United States Patent Application Publication US 2026/0242779 A1, published August 20, 2026 (application 19/541,682).

The application's sequence listing, which the Patent Office published only in electronic form, follows.

SEQUENCE LISTING (1483 sequences)

SEQ ID NO: 1 - skipped

SEQ ID NO: 2 - RNA, 10 nt, synthetic construct
  misc_feature 1..10: note = Synthetic
  source 1..10: mol_type = other RNA
aagacctttt

SEQ ID NO: 3 - RNA, 25 nt, synthetic construct
  misc_feature 1..25: note = Synthetic
  source 1..25: mol_type = other RNA
atgtgtttttgtcaaaagacctttt

SEQ ID NO: 4 - RNA, 60 nt, synthetic construct
  misc_feature 1..60: note = Synthetic
  source 1..60: mol_type = other RNA
aggccagcttgccggttttttagtcgtgctgcttcatgtgtttttgtcaaaagacctttt

SEQ ID NO: 5 - skipped

SEQ ID NO: 6 - DNA, 10 bp, synthetic construct
  misc_feature 1..10: note = Synthetic
  source 1..10: mol_type = other DNA
aagacctttt

SEQ ID NO: 7 - DNA, 25 bp, synthetic construct
  misc_feature 1..25: note = Synthetic
  source 1..25: mol_type = other DNA
atgtgtttttgtcaaaagacctttt

SEQ ID NO: 8 - DNA, 40 bp, synthetic construct
  misc_feature 1..40: note = Synthetic
  source 1..40: mol_type = other DNA
aggccagcttgccggttttttagtcgtgctgcttcatgtg

SEQ ID NO: 9 - DNA, 20 bp, synthetic construct
  misc_feature 1..20: note = Synthetic
  source 1..20: mol_type = other DNA
tttttgtcaaaagacctttt

SEQ ID NO: 10 - DNA, 30 bp, synthetic construct
  misc_feature 1..30: note = Synthetic
  source 1..30: mol_type = other DNA
gcttcatgtgtttttgtcaaaagacctttt

SEQ ID NO: 11 - DNA, 50 bp, synthetic construct
  misc_feature 1..50: note = Synthetic
  source 1..50: mol_type = other DNA
gccggttttttagtcgtgctgcttcatgtgtttttgtcaaaagacctttt

SEQ ID NO: 12 - DNA, 40 bp, synthetic construct
  misc_feature 1..40: note = Synthetic
  source 1..40: mol_type = other DNA
tagtcgtgctgcttcatgtgtttttgtcaaaagacctttt

SEQ ID NO: 13 - DNA, 20 bp, synthetic construct
  misc_feature 1..20: note = Synthetic
  modified_base 1..2: mod_base = OTHER; note = phosphorothioate bond
  source 1..20: mol_type = other DNA
ccgaagttttcttcggtttt

SEQ ID NO: 14 - DNA, 25 bp, synthetic construct
  misc_feature 1..25: note = Synthetic
  modified_base 1..2: mod_base = OTHER; note = phosphorothioate bond
  source 1..25: mol_type = other DNA
tttttccgaagttttcttcggtttt

SEQ ID NO: 15 - DNA, 30 bp, synthetic construct
  misc_feature 1..30: note = Synthetic
  modified_base 1..2: mod_base = OTHER; note = phosphorothioate bond
  source 1..30: mol_type = other DNA
aacgctttttccgaagttttcttcggtttt

SEQ ID NO: 16 - DNA, 41 bp, synthetic construct
  misc_feature 1..41: note = Synthetic
  modified_base 1..2: mod_base = OTHER; note = phosphorothioate bond
  source 1..41: mol_type = other DNA
gcgttgttttcaacgctttttccgaagttttcttcggtttt

SEQ ID NO: 17 - DNA, 62 bp, synthetic construct
  misc_feature 1..62: note = Synthetic
  modified_base 1..2: mod_base = OTHER; note = phosphorothioate bond
  source 1..62: mol_type = other DNA
ggcttcttttgaagcctttttgcgttgttttcaacgctttttccgaagttttcttcggtttt

SEQ ID NO: 18 - DNA, 25 bp, synthetic construct
  misc_feature 1..25: note = Synthetic
  modified_base 1..2: mod_base = OTHER; note = phosphorothioate bond
  source 1..25: mol_type = other DNA
atgtgtttttgtcaaaagacctttt

SEQ ID NO: 19 - DNA, 25 bp, synthetic construct
  misc_feature 1..25: note = Synthetic
  source 1..25: mol_type = other DNA
aaaaaaaaaaaaaaaaaaaaaaaaa

SEQ ID NO: 20 - DNA, 25 bp, synthetic construct
  misc_feature 1..25: note = Synthetic
  source 1..25: mol_type = other DNA
ttttttttttttttttttttttttt

SEQ ID NO: 21 - RNA, 25 nt, synthetic construct
  misc_feature 1..25: note = Synthetic
  modified_base 1..2: mod_base = OTHER; note = 2' O-methyl nucleotide and phosphorothioate linkage
  source 1..25: mol_type = other RNA
atgtgtttttgtcaaaagacctttt

SEQ ID NO: 22 - RNA, 25 nt, synthetic construct
  misc_feature 1..25: note = Synthetic
  modified_base 1..2: mod_base = OTHER; note = 2' O-methyl nucleotide and phosphorothioate linkage
  source 1..25: mol_type = other RNA
aaaaaaaaaaaaaaaaaaaaaaaaa

SEQ ID NO: 23 - RNA, 25 nt, synthetic construct
  misc_feature 1..25: note = Synthetic
  modified_base 1..2: mod_base = OTHER; note = 2' O-methyl nucleotide and phosphorothioate linkage
  source 1..25: mol_type = other RNA
ttttttttttttttttttttttttt

SEQ ID NO: 24 - RNA, 61 nt, synthetic construct
  misc_feature 1..61: note = Synthetic
  source 1..61: mol_type = other RNA
taatttctactcttgtagatggcctgagatgccagctgtcctaatttctactcttgtagat

SEQ ID NO: 25 - RNA, 61 nt, synthetic construct; identical to SEQ ID NO: 24
  misc_feature 1..61: note = Synthetic
  modified_base 1: mod_base = OTHER; note = 2' O-methyl nucleotide and phosphorothioate linkage
  source 1..61: mol_type = other RNA

SEQ ID NO: 26 - DNA, 66 bp, synthetic construct
  modified_base 1: mod_base = OTHER; note = 3'-3' phosphodiester bond to a thymidine
  modified_base 1..25: mod_base = OTHER; note = locked nucleic acid
  misc_feature 26..66: note = RNA
  modified_base 26: mod_base = OTHER; note = uracil
  modified_base 29..31: mod_base = OTHER; note = uracil
  modified_base 33: mod_base = OTHER; note = uracil
  modified_base 36: mod_base = OTHER; note = modified_base
  modified_base 38..39: mod_base = OTHER; note = uracil
  modified_base 41: mod_base = OTHER; note = 2..26
  modified_base 45: mod_base = OTHER; note = uracil
  modified_base 51: mod_base = OTHER; note = locked nucleic acid
  modified_base 54: mod_base = OTHER; note = uracil
  modified_base 62..63: mod_base = OTHER; note = uracil
  modified_base 65: mod_base = OTHER; note = uracil
  modified_base 66: mod_base = OTHER; note = 3'-3' phosphodiester bond to a thymidine
  source 1..66: mol_type = other DNA
atgtgtttttgtcaaaagacctttttaatttctactcttgtagatcaacctcctggccagattctc

SEQ ID NO: 27 - RNA, 20 nt, synthetic construct
  misc_feature 1..20: note = Synthetic
  source 1..20: mol_type = other RNA
taatttctactcttgtagat

SEQ ID NO: 28 - RNA, 41 nt, synthetic construct
  misc_feature 1..41: note = Synthetic
  source 1..41: mol_type = other RNA
ttcctttcctcgtgaaggatataatttctactcttgtagat

SEQ ID NO: 29 - DNA, 66 bp, synthetic construct
  misc_feature 1..66: note = Synthetic
  misc_feature 1..25: note = DNA
  misc_feature 26..66: note = RNA
  modified_base 26..27: mod_base = OTHER; note = uracil
  modified_base 30..32: mod_base = OTHER; note = uracil
  modified_base 35: mod_base = OTHER; note = uracil
  modified_base 38: mod_base = OTHER; note = uracil
  modified_base 45: mod_base = OTHER; note = uracil
  modified_base 47: mod_base = OTHER; note = uracil
  modified_base 50..52: mod_base = OTHER; note = uracil
  modified_base 54: mod_base = OTHER; note = uracil
  modified_base 57: mod_base = OTHER; note = uracil
  modified_base 59..60: mod_base = OTHER; note = uracil
  modified_base 62: mod_base = OTHER; note = uracil
  modified_base 66: mod_base = OTHER; note = uracil
  source 1..66: mol_type = other DNA
atgtgtttttgtcaaaagaccttttttcctttcctcgtgaaggatataatttctactcttgtagat

SEQ ID NO: 30 - RNA, 80 nt, synthetic construct
  misc_feature 1..80: note = Synthetic
  source 1..80: mol_type = other RNA
gttttagagctagaaatagcaagttaaaataaggctagtccgttatcaacttgaaaaagtggcaccgagtcggtgctttt

SEQ ID NO: 31 - RNA, 100 nt, synthetic construct
  misc_feature 1..100: note = Synthetic
  source 1..100: mol_type = other RNA
acgtggcgtgaacatctgccgttttagagctagaaatagcaagttaaaataaggctagtccgttatcaacttgaaaaagtggcaccgagtcggtgctttt

SEQ ID NO: 32 - RNA, 101 nt, synthetic construct
  misc_feature 1..101: note = Synthetic
  modified_base 1: mod_base = OTHER; note = 2' O-methyl nucleotide and phosphorothioate linkage
  modified_base 2: mod_base = OTHER; note = 2' O-methyl nucleotide and phosphorothioate linkage
  modified_base 3: mod_base = OTHER; note = 2' O-methyl nucleotide and phosphorothioate linkage
  modified_base 5: mod_base = OTHER; note = phosphorothioate bond
  modified_base 6: mod_base = OTHER; note = phosphorothioate bond
  modified_base 7: mod_base = OTHER; note = phosphorothioate bond
  modified_base 8: mod_base = OTHER; note = 2' O-fluoro nucleotide and phosphorothioate linkage
  modified_base 9: mod_base = OTHER; note = 2' O-fluoro nucleotide and phosphorothioate linkage
  modified_base 10: mod_base = OTHER; note = 2' O-fluoro nucleotide
  modified_base 11: mod_base = OTHER; note = 2' O-fluoro nucleotide
  modified_base 13: mod_base = OTHER; note = 2' O-fluoro nucleotide
  modified_base 14: mod_base = OTHER; note = 2' O-fluoro nucleotide
  modified_base 17: mod_base = OTHER; note = 2' O-fluoro nucleotide
  modified_base 18: mod_base = OTHER; note = 2' O-fluoro nucleotide
  modified_base 21: mod_base = OTHER; note = 2' O-methyl nucleotide
  modified_base 28: mod_base = OTHER; note = 2' O-methyl nucleotide
  modified_base 29: mod_base = OTHER; note = 2' O-methyl nucleotide
  modified_base 30: mod_base = OTHER; note = 2' O-methyl nucleotide
  modified_base 31: mod_base = OTHER; note = 2' O-methyl nucleotide
  modified_base 32: mod_base = OTHER; note = 2' O-methyl nucleotide
  modified_base 33: mod_base = OTHER; note = 2' O-methyl nucleotide
  modified_base 34: mod_base = OTHER; note = 2' O-methyl nucleotide
  modified_base 35: mod_base = OTHER; note = 2' O-methyl nucleotide
  modified_base 36: mod_base = OTHER; note = 2' O-methyl nucleotide
  modified_base 37: mod_base = OTHER; note = 2' O-methyl nucleotide
  modified_base 38: mod_base = OTHER; note = 2' O-methyl nucleotide
  modified_base 39: mod_base = OTHER; note = 2' O-methyl nucleotide
  modified_base 40: mod_base = OTHER; note = 2' O-methyl nucleotide
  modified_base 41: mod_base = OTHER; note = 2' O-methyl nucleotide
  modified_base 42: mod_base = OTHER; note = 2' O-methyl nucleotide
  modified_base 46: mod_base = OTHER; note = 2' O-methyl nucleotide
  modified_base 48: mod_base = OTHER; note = 2' O-methyl nucleotide
  modified_base 50: mod_base = OTHER; note = 2' O-methyl nucleotide
  modified_base 52: mod_base = OTHER; note = 2' O-methyl nucleotide
  modified_base 53: mod_base = OTHER; note = 2' O-methyl nucleotide
  modified_base 54: mod_base = OTHER; note = 2' O-methyl nucleotide
  modified_base 55: mod_base = OTHER; note = 2' O-methyl nucleotide
  modified_base 56: mod_base = OTHER; note = 2' O-methyl nucleotide
  modified_base 57: mod_base = OTHER; note = 2' O-methyl nucleotide
  modified_base 60: mod_base = OTHER; note = 2' O-methyl nucleotide
  modified_base 61: mod_base = OTHER; note = 2' O-methyl nucleotide
  modified_base 66: mod_base = OTHER; note = 2' O-methyl nucleotide
  modified_base 67: mod_base = OTHER; note = 2' O-methyl nucleotide
  modified_base 70: mod_base = OTHER; note = 2' O-methyl nucleotide and phosphorothioate linkage
  modified_base 71: mod_base = OTHER; note = 2' O-methyl nucleotide and phosphorothioate linkage
  modified_base 72: mod_base = OTHER; note = 2' O-methyl nucleotide and phosphorothioate linkage
  modified_base 73: mod_base = OTHER; note = 2' O-methyl nucleotide and phosphorothioate linkage
  modified_base 74: mod_base = OTHER; note = 2' O-methyl nucleotide and phosphorothioate linkage
  modified_base 75: mod_base = OTHER; note = 2' O-methyl nucleotide and phosphorothioate linkage
  modified_base 76: mod_base = OTHER; note = 2' O-methyl nucleotide and phosphorothioate linkage
  modified_base 77: mod_base = OTHER; note = 2' O-methyl nucleotide and phosphorothioate linkage
  modified_base 78: mod_base = OTHER; note = 2' O-methyl nucleotide and phosphorothioate linkage
  modified_base 79: mod_base = OTHER; note = 2' O-methyl nucleotide
  modified_base 80: mod_base = OTHER; note = 2' O-methyl nucleotide
  modified_base 81: mod_base = OTHER; note = 2' O-methyl nucleotide
  modified_base 82: mod_base = OTHER; note = 2' O-methyl nucleotide and phosphorothioate linkage
  modified_base 83: mod_base = OTHER; note = 2' O-methyl nucleotide
  modified_base 84: mod_base = OTHER; note = 2' O-methyl nucleotide and phosphorothioate linkage
  modified_base 85: mod_base = OTHER; note = 2' O-methyl nucleotide and phosphorothioate linkage
  modified_base 86: mod_base = OTHER; note = 2' O-methyl nucleotide and phosphorothioate linkage
  modified_base 87: mod_base = OTHER; note = 2' O-methyl nucleotide and phosphorothioate linkage
  modified_base 88: mod_base = OTHER; note = 2' O-methyl nucleotide and phosphorothioate linkage
  modified_base 89: mod_base = OTHER; note = 2' O-methyl nucleotide and phosphorothioate linkage
  modified_base 90: mod_base = OTHER; note = 2' O-methyl nucleotide and phosphorothioate linkage
  modified_base 91: mod_base = OTHER; note = 2' O-methyl nucleotide
  modified_base 92: mod_base = OTHER; note = 2' O-methyl nucleotide and phosphorothioate linkage
  modified_base 93: mod_base = OTHER; note = 2' O-methyl nucleotide and phosphorothioate linkage
  modified_base 94: mod_base = OTHER; note = 2' O-methyl nucleotide and phosphorothioate linkage
  modified_base 95: mod_base = OTHER; note = 2' O-methyl nucleotide and phosphorothioate linkage
  modified_base 96: mod_base = OTHER; note = 2' O-methyl nucleotide and phosphorothioate linkage
  modified_base 97: mod_base = OTHER; note = 2' O-methyl nucleotide and phosphorothioate linkage
  modified_base 98: mod_base = OTHER; note = 2' O-methyl nucleotide and phosphorothioate linkage
  modified_base 99: mod_base = OTHER; note = 2' O-methyl nucleotide and phosphorothioate linkage
  modified_base 100: mod_base = OTHER; note = 2' O-methyl nucleotide and phosphorothioate linkage
  modified_base 101: mod_base = OTHER; note = 2' O-methyl nucleotide
  source 1..101: mol_type = other RNA
nnnnnnnnnnnnnnnnnnnngttttagagctagaaatagcaagttaaaataaggctagtccgttatcaacttgaaaaagtggcaccgagtcggtgcttttt

SEQ ID NO: 33 - RNA, 20 nt, synthetic construct
  misc_feature 1..20: note = Synthetic
  source 1..20: mol_type = other RNA
taatttctactcttgtagat

SEQ ID NO: 34 - RNA, 20 nt, synthetic construct
  misc_feature 1..20: note = Synthetic
  modified_base 1: mod_base = OTHER; note = 2' O-fluoro nucleotide
  modified_base 5: mod_base = OTHER; note = 2' O-fluoro nucleotide
  modified_base 6: mod_base = OTHER; note = 2' O-fluoro nucleotide
  modified_base 9: mod_base = OTHER; note = 2' O-fluoro nucleotide
  modified_base 10: mod_base = OTHER; note = 2' O-fluoro nucleotide
  modified_base 12: mod_base = OTHER; note = 2' O-fluoro nucleotide
  modified_base 13: mod_base = OTHER; note = 2' O-fluoro nucleotide
  modified_base 14: mod_base = OTHER; note = 2' O-fluoro nucleotide
  modified_base 16: mod_base = OTHER; note = 2' O-fluoro nucleotide
  modified_base 17: mod_base = OTHER; note = 2' O-fluoro nucleotide
  modified_base 18: mod_base = OTHER; note = 2' O-fluoro nucleotide
  modified_base 19: mod_base = OTHER; note = 2' O-fluoro nucleotide
  source 1..20: mol_type = other RNA
taatttctactcttgtagat

SEQ ID NO: 35 - RNA, 41 nt, synthetic construct
  misc_feature 1..41: note = Synthetic
  modified_base 1: mod_base = OTHER; note = 2' O-fluoro nucleotide
  modified_base 5: mod_base = OTHER; note = 2' O-fluoro nucleotide
  modified_base 6: mod_base = OTHER; note = 2' O-fluoro nucleotide
  modified_base 9: mod_base = OTHER; note = 2' O-fluoro nucleotide
  modified_base 10: mod_base = OTHER; note = 2' O-fluoro nucleotide
  modified_base 12: mod_base = OTHER; note = 2' O-fluoro nucleotide
  modified_base 13: mod_base = OTHER; note = 2' O-fluoro nucleotide
  modified_base 14: mod_base = OTHER; note = 2' O-fluoro nucleotide
  modified_base 16: mod_base = OTHER; note = 2' O-fluoro nucleotide
  modified_base 17: mod_base = OTHER; note = 2' O-fluoro nucleotide
  modified_base 18: mod_base = OTHER; note = 2' O-fluoro nucleotide
  modified_base 19: mod_base = OTHER; note = 2' O-fluoro nucleotide
  source 1..41: mol_type = other RNA
taatttctactcttgtagatnnnnnnnnnnnnnnnnnnnnn

SEQ ID NO: 36 - RNA, 41 nt, synthetic construct; identical to SEQ ID NO: 35
  misc_feature 1..41: note = Synthetic
  modified_base 21: mod_base = OTHER; note = 2' O-fluoro nucleotide
  modified_base 28: mod_base = OTHER; note = 2' O-fluoro nucleotide
  modified_base 29: mod_base = OTHER; note = 2' O-fluoro nucleotide
  modified_base 30: mod_base = OTHER; note = 2' O-fluoro nucleotide
  modified_base 31: mod_base = OTHER; note = 2' O-fluoro nucleotide
  modified_base 32: mod_base = OTHER; note = 2' O-fluoro nucleotide
  modified_base 37: mod_base = OTHER; note = 2' O-fluoro nucleotide
  modified_base 39: mod_base = OTHER; note = 2' O-fluoro nucleotide
  modified_base 40: mod_base = OTHER; note = 2' O-fluoro nucleotide
  modified_base 41: mod_base = OTHER; note = 2' O-fluoro nucleotide
  source 1..41: mol_type = other RNA

SEQ ID NO: 37 - RNA, 20 nt, synthetic construct
  misc_feature 1..20: note = Synthetic
  modified_base 1: mod_base = OTHER; note = 2' O-fluoro nucleotide
  modified_base 5: mod_base = OTHER; note = 2' O-fluoro nucleotide
  modified_base 6: mod_base = OTHER; note = 2' O-fluoro nucleotide
  modified_base 7: mod_base = OTHER; note = 2' O-fluoro nucleotide
  modified_base 8: mod_base = OTHER; note = 2' O-fluoro nucleotide
  modified_base 9: mod_base = OTHER; note = 2' O-fluoro nucleotide
  modified_base 10: mod_base = OTHER; note = 2' O-fluoro nucleotide
  modified_base 12: mod_base = OTHER; note = 2' O-fluoro nucleotide
  modified_base 13: mod_base = OTHER; note = 2' O-fluoro nucleotide
  modified_base 14: mod_base = OTHER; note = 2' O-fluoro nucleotide
  modified_base 16: mod_base = OTHER; note = 2' O-fluoro nucleotide
  modified_base 17: mod_base = OTHER; note = 2' O-fluoro nucleotide
  modified_base 18: mod_base = OTHER; note = 2' O-fluoro nucleotide
  modified_base 19: mod_base = OTHER; note = 2' O-fluoro nucleotide
  source 1..20: mol_type = other RNA
taatttctactcttgtagat

SEQ ID NO: 38 - RNA, 41 nt, synthetic construct; identical to SEQ ID NO: 35
  misc_feature 1..41: note = Synthetic
  modified_base 1: mod_base = OTHER; note = 2' O-fluoro nucleotide
  modified_base 5: mod_base = OTHER; note = 2' O-fluoro nucleotide
  modified_base 6: mod_base = OTHER; note = 2' O-fluoro nucleotide
  modified_base 7: mod_base = OTHER; note = 2' O-fluoro nucleotide
  modified_base 8: mod_base = OTHER; note = 2' O-fluoro nucleotide
  modified_base 9: mod_base = OTHER; note = 2' O-fluoro nucleotide
  modified_base 10: mod_base = OTHER; note = 2' O-fluoro nucleotide
  modified_base 12: mod_base = OTHER; note = 2' O-fluoro nucleotide
  modified_base 13: mod_base = OTHER; note = 2' O-fluoro nucleotide
  modified_base 14: mod_base = OTHER; note = 2' O-fluoro nucleotide
  modified_base 16: mod_base = OTHER; note = 2' O-fluoro nucleotide
  modified_base 17: mod_base = OTHER; note = 2' O-fluoro nucleotide
  modified_base 18: mod_base = OTHER; note = 2' O-fluoro nucleotide
  modified_base 19: mod_base = OTHER; note = 2' O-fluoro nucleotide
  source 1..41: mol_type = other RNA

SEQ ID NO: 39 - RNA, 41 nt, synthetic construct; identical to SEQ ID NO: 35
  misc_feature 1..41: note = Synthetic
  modified_base 21: mod_base = OTHER; note = 2' O-fluoro nucleotide
  modified_base 22: mod_base = OTHER; note = 2' O-fluoro nucleotide
  modified_base 23: mod_base = OTHER; note = 2' O-fluoro nucleotide
  modified_base 27: mod_base = OTHER; note = 2' O-fluoro nucleotide
  modified_base 28: mod_base = OTHER; note = 2' O-fluoro nucleotide
  modified_base 29: mod_base = OTHER; note = 2' O-fluoro nucleotide
  modified_base 30: mod_base = OTHER; note = 2' O-fluoro nucleotide
  modified_base 31: mod_base = OTHER; note = 2' O-fluoro nucleotide
  modified_base 32: mod_base = OTHER; note = 2' O-fluoro nucleotide
  modified_base 34: mod_base = OTHER; note = 2' O-fluoro nucleotide
  modified_base 35: mod_base = OTHER; note = 2' O-fluoro nucleotide
  modified_base 37: mod_base = OTHER; note = 2' O-fluoro nucleotide
  modified_base 38: mod_base = OTHER; note = 2' O-fluoro nucleotide
  modified_base 39: mod_base = OTHER; note = 2' O-fluoro nucleotide
  modified_base 40: mod_base = OTHER; note = 2' O-fluoro nucleotide
  modified_base 41: mod_base = OTHER; note = 2' O-fluoro nucleotide
  source 1..41: mol_type = other RNA

SEQ ID NO: 40 - protein, 1334 aa, synthetic construct
  REGION 1..1334: note = Synthetic
MGHHHHHHGSTQFEGFTNLYQVSKTLRFELIPQGKTLKHIQEQGFIEEDKARNDHYKELKPIIDRIYKTYADQCLQLVQLDWENLSAAIDSYRKEKTEETRNALIEEQATYRNAIHDYFIGRTDNLTDAINKRHAEIYKGLFKAELFNGKVLKQLGTVTTTEHENALLRSFDKFTTYFSGFYENRKNVFSAEDISTAIPHRIVQDNFPKFKENCHIFTRLITAVPSLREHFENVKKAIGIFVSTSIEEVFSFPFYNQLLTQTQIDLYNQLLGGISREAGTEKIKGLNEVLNLAIQKNDETAHIIASLPHRFIPLFKQILSDRNTLSFILEEFKSDEEVIQSFCKYKTLLRNENVLETAEALFNELNSIDLTHIFISHKKLETISSALCDHWDTLRNALYERRISELTGKITKSAKEKVQRSLKHEDINLQEIISAAGKELSEAFKQKTSEILSHAHAALDQPLPTTLKKQEEKEILKSQLDSLLGLYHLLDWFAVDESNEVDPEFSARLTGIKLEMEPSLSFYNKARNYATKKPYSVEKFKLNFQMPTLASGWDVNKEKNNGAILFVKNGLYYLGIMPKQKGRYKALSFEPTEKTSEGFDKMYYDYFPDAAKMIPKCSTQLKAVTAHFQTHTTPILLSNNFIEPLEITKEIYDLNNPEKEPKKFQTAYAKKTGDQKGYREALCKWIDFTRDFLSKYTKTTSIDLSSLRPSSQYKDLGEYYAELNPLLYHISFQRIAEKEIMDAVETGKLYLFQIYNKDFAKGHHGKPNLHTLYWTGLFSPENLAKTSIKLNGQAELFYRPKSRMKRMAARLGEKMLNKKLKDQKTPIPDTLYQELYDYVNHRLSHDLSDEARALLPNVITKEVSHEIIKDRRFTSDKFFFHVPITLNYQAANSPSKFNQRVNAYLKEHPETPIIGIDRGERNLIYITVIDSTGKILEQRSLNTIQQFDYQKKLDNREKERVAARQAWSVVGTIKDLKQGYLSQVIHEIVDLMIHYQAVVVLENLNFGFKSKRTGIAEKAVYQQFEKMLIDKLNCLVLKDYPAEKVGGVLNPYQLTDQFTSFAKMGTQSGFLFYVPAPYTSKIDPLTGFVDPFVWKTIKNHESRKHFLEGFDFLHYDVKTGDFILHFKMNRNLSFQRGLPGFMPAWDIVFEKNETQFDAKGTPFIAGKRIVPVIENHRFTGRYRDLYPANELIALLEEKGIVFRDGSNILPKLLENDDSHAIDTMVALIRSVLQMRNSNAATGEDYINSPVRDLNGVCFDSRFQNPEWPMDADANGAYHIALKGQLLLNHLKESKDLKLQNGISNQDWLAYIQELRNGSPKKKRKVGSPKKKRKV

SEQ ID NO: 41 - protein, 1363 aa, synthetic construct
  REGION 1..1363: note = Synthetic
MTQFEGFTNLYQVSKTLRFELIPQGKTLKHIQEQGFIEEDKARNDHYKELKPIIDRIYKTYADQCLQLVQLDWENLSAAIDSYRKEKTEETRNALIEEQATYRNAIHDYFIGRTDNLTDAINKRHAEIYKGLFKAELFNGKVLKQLGTVTTTEHENALLRSFDKFTTYFSGFYENRKNVFSAEDISTAIPHRIVQDNFPKFKENCHIFTRLITAVPSLREHFENVKKAIGIFVSTSIEEVFSFPFYNQLLTQTQIDLYNQLLGGISREAGTEKIKGLNEVLNLAIQKNDETAHIIASLPHRFIPLFKQILSDRNTLSFILEEFKSDEEVIQSFCKYKTLLRNENVLETAEALFNELNSIDLTHIFISHKKLETISSALCDHWDTLRNALYERRISELTGKITKSAKEKVQRSLKHEDINLQEIISAAGKELSEAFKQKTSEILSHAHAALDQPLPTTLKKQEEKEILKSQLDSLLGLYHLLDWFAVDESNEVDPEFSARLTGIKLEMEPSLSFYNKARNYATKKPYSVEKFKLNFQRPTLASGWDVNKEKNNGAILFVKNGLYYLGIMPKQKGRYKALSFEPTEKTSEGFDKMYYDYFPDAAKMIPKCSTQLKAVTAHFQTHTTPILLSNNFIEPLEITKEIYDLNNPEKEPKKFQTAYAKKTGDQKGYREALCKWIDFTRDFLSKYTKTTSIDLSSLRPSSQYKDLGEYYAELNPLLYHISFQRIAEKEIMDAVETGKLYLFQIYNKDFAKGHHGKPNLHTLYWTGLFSPENLAKTSIKLNGQAELFYRPKSRMKRMAHRLGEKMLNKKLKDQKTPIPDTLYQELYDYVNHRLSHDLSDEARALLPNVITKEVSHEIIKDRRFTSDKFLFHVPITLNYQAANSPSKFNQRVNAYLKEHPETPIIGIDRGERNLIYITVIDSTGKILEQRSLNTIQQFDYQKKLDNREKERVAARQAWSVVGTIKDLKQGYLSQVIHEIVDLMIHYQAVVVLENLNFGFKSKRTGIAEKAVYQQFEKMLIDKLNCLVLKDYPAEKVGGVLNPYQLTDQFTSFAKMGTQSGFLFYVPAPYTSKIDPLTGFVDPFVWKTIKNHESRKHFLEGFDFLHYDVKTGDFILHFKMNRNLSFQRGLPGFMPAWDIVFEKNETQFDAKGTPFIAGKRIVPVIENHRFTGRYRDLYPANELIALLEEKGIVFRDGSNILPKLLENDDSHAIDTMVALIRSVLQMRNSNAATGEDYINSPVRDLNGVCFDSRFQNPEWPMDADANGAYHIALKGQLLLNHLKESKDLKLQNGISNQDWLAYIQELRNGRSSDDEATADSQHAAPPKKKRKVGGSGGSGGSGGSGGSGGSGGSGGSLEHHHHHH

SEQ ID NO: 42 - protein, 1363 aa, synthetic construct
  REGION 1..1363: note = Synthetic
MTQFEGFTNLYQVSKTLRFELIPQGKTLKHIQEQGFIEEDKARNDHYKELKPIIDRIYKTYADQCLQLVQLDWENLSAAIDSYRKEKTEETRNALIEEQATYRNAIHDYFIGRTDNLTDAINKRHAEIYKGLFKAELFNGKVLKQLGTVTTTEHENALLRSFDKFTTYFSGFYENRKNVFSAEDISTAIPHRIVQDNFPKFKENCHIFTRLITAVPSLREHFENVKKAIGIFVSTSIEEVFSFPFYNQLLTQTQIDLYNQLLGGISREAGTEKIKGLNEVLNLAIQKNDETAHIIASLPHRFIPLFKQILSDRNTLSFILEEFKSDEEVIQSFCKYKTLLRNENVLETAEALFNELNSIDLTHIFISHKKLETISSALCDHWDTLRNALYERRISELTGKITKSAKEKVQRSLKHEDINLQEIISAAGKELSEAFKQKTSEILSHAHAALDQPLPTTLKKQEEKEILKSQLDSLLGLYHLLDWFAVDESNEVDPEFSARLTGIKLEMEPSLSFYNKARNYATKKPYSVEKFKLNFQMPTLASGWDVNKEKNNGAILFVKNGLYYLGIMPKQKGRYKALSFEPTEKTSEGFDKMYYDYFPDAAKMIPKCSTQLKAVTAHFQTHTTPILLSNNFIEPLEITKEIYDLNNPEKEPKKFQTAYAKKTGDQKGYREALCKWIDFTRDFLSKYTKTTSIDLSSLRPSSQYKDLGEYYAELNPLLYHISFQRIAEKEIMDAVETGKLYLFQIYNKDFAKGHHGKPNLHTLYWTGLFSPENLAKTSIKLNGQAELFYRPKSRMKRMAHRLGEKMLNKKLKDQKTPIPDTLYQELYDYVNHRLSHDLSDEARALLPNVITKEVSHEIIKDRRFTSDKFFFHVPITLNYQAANSPSKFNQRVNAYLKEHPETPIIGIDRGERNLIYITVIDSTGKILEQRSLNTIQQFDYQKKLDNREKERVAARQAWSVVGTIKDLKQGYLSQVIHEIVDLMIHYQAVVVLENLNFGFKSKRTGIAEKAVYQQFEKMLIDKLNCLVLKDYPAEKVGGVLNPYQLTDQFTSFAKMGTQSGFLFYVPAPYTSKIDPLTGFVDPFVWKTIKNHESRKHFLEGFDFLHYDVKTGDFILHFKMNRNLSFQRGLPGFMPAWDIVFEKNETQFDAKGTPFIAGKRIVPVIENHRFTGRYRDLYPANELIALLEEKGIVFRDGSNILPKLLENDDSHAIDTMVALIRSVLQMRNSNAATGEDYINSPVRDLNGVCFDSRFQNPEWPMDADANGAYHIALKGQLLLNHLKESKDLKLQNGISNQDWLAYIQELRNGRSSDDEATADSQHAAPPKKKRKVGGSGGSGGSGGSGGSGGSGGSGGSLEHHHHHH

SEQ ID NO: 43 - protein, 1363 aa, synthetic construct
  REGION 1..1363: note = Synthetic
MTQFEGFTNLYQVSKTLRFELIPQGKTLKHIQEQGFIEEDKARNDHYKELKPIIDRIYKTYADQCLQLVQLDWENLSAAIDSYRKEKTEETRNALIEEQATYRNAIHDYFIGRTDNLTDAINKRHAEIYKGLFKAELFNGKVLKQLGTVTTTEHENALLRSFDKFTTYFSGFYENRKNVFSAEDISTAIPHRIVQDNFPKFKENCHIFTRLITAVPSLREHFENVKKAIGIFVSTSIEEVFSFPFYNQLLTQTQIDLYNQLLGGISREAGTEKIKGLNEVLNLAIQKNDETAHIIASLPHRFIPLFKQILSDRNTLSFILEEFKSDEEVIQSFCKYKTLLRNENVLETAEALFNELNSIDLTHIFISHKKLETISSALCDHWDTLRNALYERRISELTGKITKSAKEKVQRSLKHEDINLQEIISAAGKELSEAFKQKTSEILSHAHAALDQPLPTTLKKQEEKEILKSQLDSLLGLYHLLDWFAVDESNEVDPEFSARLTGIKLEMEPSLSFYNKARNYATKKPYSVEKFKLNFQRPTLASGWDVNKEKNNGAILFVKNGLYYLGIMPKQKGRYKALSFEPTEKTSEGFDKMYYDYFPDAAKMIPKCSTQLKAVTAHFQTHTTPILLSNNFIEPLEITKEIYDLNNPEKEPKKFQTAYAKKTGDQKGYREALCKWIDFTRDFLSKYTKTTSIDLSSLRPSSQYKDLGEYYAELNPLLYHISFQRIAEKEIMDAVETGKLYLFQIYNKDFAKGHHGKPNLHTLYWTGLFSPENLAKTSIKLNGQAELFYRPKSRMKRMAARLGEKMLNKKLKDQKTPIPDTLYQELYDYVNHRLSHDLSDEARALLPNVITKEVSHEIIKDRRFTSDKFLFHVPITLNYQAANSPSKFNQRVNAYLKEHPETPIIGIDRGERNLIYITVIDSTGKILEQRSLNTIQQFDYQKKLDNREKERVAARQAWSVVGTIKDLKQGYLSQVIHEIVDLMIHYQAVVVLENLNFGFKSKRTGIAEKAVYQQFEKMLIDKLNCLVLKDYPAEKVGGVLNPYQLTDQFTSFAKMGTQSGFLFYVPAPYTSKIDPLTGFVDPFVWKTIKNHESRKHFLEGFDFLHYDVKTGDFILHFKMNRNLSFQRGLPGFMPAWDIVFEKNETQFDAKGTPFIAGKRIVPVIENHRFTGRYRDLYPANELIALLEEKGIVFRDGSNILPKLLENDDSHAIDTMVALIRSVLQMRNSNAATGEDYINSPVRDLNGVCFDSRFQNPEWPMDADANGAYHIALKGQLLLNHLKESKDLKLQNGISNQDWLAYIQELRNGRSSDDEATADSQHAAPPKKKRKVGGSGGSGGSGGSGGSGGSGGSGGSLEHHHHHH

SEQ ID NO: 44 - protein, 1331 aa, synthetic construct
  REGION 1..1331: note = Synthetic
MTQFEGFTNLYQVSKTLRFELIPQGKTLKHIQEQGFIEEDKARNDHYKELKPIIDRIYKTYADQCLQLVQLDWENLSAAIDSYRKEKTEETRNALIEEQATYRNAIHDYFIGRTDNLTDAINKRHAEIYKGLFKAELFNGKVLKQLGTVTTTEHENALLRSFDKFTTYFSGFYENRKNVFSAEDISTAIPHRIVQDNFPKFKENCHIFTRLITAVPSLREHFENVKKAIGIFVSTSIEEVFSFPFYNQLLTQTQIDLYNQLLGGISREAGTEKIKGLNEVLNLAIQKNDETAHIIASLPHRFIPLFKQILSDRNTLSFILEEFKSDEEVIQSFCKYKTLLRNENVLETAEALFNELNSIDLTHIFISHKKLETISSALCDHWDTLRNALYERRISELTGKITKSAKEKVQRSLKHEDINLQEIISAAGKELSEAFKQKTSEILSHAHAALDQPLPTTLKKQEEKEILKSQLDSLLGLYHLLDWFAVDESNEVDPEFSARLTGIKLEMEPSLSFYNKARNYATKKPYSVEKFKLNFQRPTLASGWDVNKEKNNGAILFVKNGLYYLGIMPKQKGRYKALSFEPTEKTSEGFDKMYYDYFPDAAKMIPKCSTQLKAVTAHFQTHTTPILLSNNFIEPLEITKEIYDLNNPEKEPKKFQTAYAKKTGDQKGYREALCKWIDFTRDFLSKYTKTTSIDLSSLRPSSQYKDLGEYYAELNPLLYHISFQRIAEKEIMDAVETGKLYLFQIYNKDFAKGHHGKPNLHTLYWTGLFSPENLAKTSIKLNGQAELFYRPKSRMKRMAARLGEKMLNKKLKDQKTPIPDTLYQELYDYVNHRLSHDLSDEARALLPNVITKEVSHEIIKDRRFTSDKFLFHVPITLNYQAANSPSKFNQRVNAYLKEHPETPIIGIDRGERNLIYITVIDSTGKILEQRSLNTIQQFDYQKKLDNREKERVAARQAWSVVGTIKDLKQGYLSQVIHEIVDLMIHYQAVVVLENLNFGFKSKRTGIAEKAVYQQFEKMLIDKLNCLVLKDYPAEKVGGVLNPYQLTDQFTSFAKMGTQSGFLFYVPAPYTSKIDPLTGFVDPFVWKTIKNHESRKHFLEGFDFLHYDVKTGDFILHFKMNRNLSFQRGLPGFMPAWDIVFEKNETQFDAKGTPFIAGKRIVPVIENHRFTGRYRDLYPANELIALLEEKGIVFRDGSNILPKLLENDDSHAIDTMVALIRSVLQMRNSNAATGEDYINSPVRDLNGVCFDSRFQNPEWPMDADANGAYHIALKGQLLLNHLKESKDLKLQNGISNQDWLAYIQELRNGRSSDDEATADSQHAAPPKKKRKV

SEQ ID NO: 45 - DNA, 3993 bp, synthetic construct
  misc_feature 1..3993: note = Synthetic
  source 1..3993: mol_type = other DNA
atgacccagtttgaaggtttcaccaatctgtatcaggttagcaaaaccctgcgttttgaactgattccgcagggtaaaaccctgaaacatattcaagaacagggcttcatcgaagaggataaagcacgtaacgatcactacaaagaactgaaaccgattatcgaccgcatctataaaacctatgcagatcagtgtctgcagctggttcagctggattgggaaaatctgagcgcagcaattgatagttatcgcaaagaaaaaaccgaagaaacccgtaatgcactgattgaagaacaggcaacctatcgtaatgccatccatgattatttcattggtcgtaccgataatctgaccgatgcaattaacaaacgtcacgccgaaatctataaaggcctgtttaaagccgaactgtttaatggcaaagttctgaaacagctgggcaccgttaccaccaccgaacatgaaaatgcactgctgcgtagctttgataaattcaccacctatttcagcggcttttatgagaatcgcaaaaacgtgtttagcgcagaagatattagcaccgcaattccgcatcgtattgtgcaggataatttcccgaaattcaaagagaactgccacatttttacccgtctgattaccgcagttccgagcctgcgtgaacattttgaaaacgttaaaaaagccatcggcatctttgttagcaccagcattgaagaagtttttagcttcccgttttacaatcagctgctgacccagacccagattgatctgtataaccaactgctgggtggtattagccgtgaagcaggcaccgaaaaaatcaaaggtctgaatgaagtgctgaatctggccattcagaaaaatgatgaaaccgcacatattattgcaagcctgccgcatcgttttattccgctgttcaaacaaattctgagcgatcgtaataccctgagctttattctggaagaattcaaatccgatgaagaggtgattcagagcttttgcaaatacaaaacgctgctgcgcaatgaaaatgttctggaaactgccgaagcactgtttaacgaactgaatagcattgatctgacccacatctttatcagccacaaaaaactggaaaccatttcaagcgcactgtgtgatcattgggataccctgcgtaatgccctgtatgaacgtcgtattagcgaactgaccggtaaaattaccaaaagcgcgaaagaaaaagttcagcgcagtctgaaacatgaggatattaatctgcaagagattattagcgcagccggtaaagaactgtcagaagcatttaaacagaaaaccagcgaaattctgtcacatgcacatgcagcactggatcagccgctgccgaccaccctgaaaaaacaagaagaaaaagaaatcctgaaaagccagctggatagcctgctgggtctgtatcatctgctggactggtttgcagttgatgaaagcaatgaagttgatccggaatttagcgcacgtctgaccggcattaaactggaaatggaaccgagcctgagcttttataacaaagcccgtaattatgccaccaaaaaaccgtatagcgtcgaaaaattcaaactgaactttcagcgtccgaccctggcaagcggttgggatgttaataaagaaaaaaacaacggtgccatcctgttcgtgaaaaatggcctgtattatctgggtattatgccgaaacagaaaggtcgttataaagcgctgagctttgaaccgacggaaaaaaccagtgaaggttttgataaaatgtactacgactattttccggatgcagccaaaatgattccgaaatgtagcacccagctgaaagcagttaccgcacattttcagacccataccaccccgattctgctgagcaataactttattgaaccgctggaaatcaccaaagagatctacgatctgaataacccggaaaaagagccgaaaaaattccagaccgcatatgcaaaaaaaaccggtgatcagaaaggttatcgtgaagcgctgtgtaaatggattgatttcacccgtgattttctgagcaaatacaccaaaaccaccagtatcgatctgagcagcctgcgtccgagcagccagtataaagatctgggcgaatattatgcagaactgaatccgctgctgtatcatattagctttcagcgtattgccgagaaagaaatcatggacgcagttgaaaccggtaaactgtacctgttccagatctacaataaagattttgccaaaggccatcatggcaaaccgaatctgcataccctgtattggaccggtctgtttagccctgaaaatctggcaaaaacctcgattaaactgaatggtcaggcggaactgttttatcgtccgaaaagccgtatgaaacgtatggcagctcgtctgggtgaaaaaatgctgaacaaaaaactgaaagaccagaaaaccccgatcccggatacactgtatcaagaactgtatgattatgtgaaccatcgtctgagccatgatctgagtgatgaagcacgtgccctgctgccgaatgttattaccaaagaagttagccacgagatcattaaagatcgtcgttttaccagcgacaaattcctgtttcatgtgccgattaccctgaattatcaggcagcaaatagcccgagcaaatttaaccagcgtgttaatgcatatctgaaagaacatccagaaacgccgattattggtattgatcgtggtgaacgtaacctgatttatatcaccgttattgatagcaccggcaaaatcctggaacagcgtagcctgaataccattcagcagtttgattaccagaaaaaactggataatcgcgagaaagaacgtgttgcagcacgtcaggcatggtcagttgttggtacaattaaagacctgaaacagggttatctgagccaggttattcatgaaattgtggatctgatgattcactatcaggccgttgttgtgctggaaaacctgaattttggctttaaaagcaaacgtaccggcattgcagaaaaagcagtttatcagcagttcgagaaaatgctgattgacaaactgaattgcctggtgctgaaagattatccggctgaaaaagttggtggtgttctgaatccgtatcagctgaccgatcagtttaccagctttgcaaaaatgggcacccagagcggatttctgttttatgttccggcaccgtatacgagcaaaattgatccgctgaccggttttgttgatccgtttgtttggaaaaccatcaaaaaccatgaaagccgcaaacattttctggaaggtttcgattttctgcattacgacgttaaaacgggtgatttcatcctgcactttaaaatgaatcgcaatctgagttttcagcgtggcctgcctggttttatgcctgcatgggatattgtgtttgagaaaaacgaaacacagttcgatgcaaaaggcaccccgtttattgcaggtaaacgtattgttccggtgattgaaaatcatcgtttcaccggtcgttatcgcgatctgtatccggcaaatgaactgatcgcactgctggaagagaaaggtattgtttttcgtgatggctcaaacattctgccgaaactgctggaaaatgatgatagccatgcaattgataccatggttgcactgattcgtagcgttctgcagatgcgtaatagcaatgcagcaaccggtgaagattacattaatagtccggttcgtgatctgaatggtgtttgttttgatagccgttttcagaatccggaatggccgatggatgcagatgcaaatggtgcatatcatattgcactgaaaggacagctgctgctgaaccacctgaaagaaagcaaagatctgaaactgcaaaacggcattagcaatcaggattggctggcatatatccaagaactgcgtaacggtcgtagcagtgatgatgaagcaaccgcagatagccagcatgcagcaccgcctaaaaagaaacgtaaagtt

SEQ ID NO: 46 - protein, 1331 aa, synthetic construct
  REGION 1..1331: note = Synthetic
MTQFEGFTNLYQVSKTLRFELIPQGKTLKHIQEQGFIEEDKARNDHYKELKPIIDRIYKTYADQCLQLVQLDWENLSAAIDSYRKEKTEETRNALIEEQATYRNAIHDYFIGRTDNLTDAINKRHAEIYKGLFKAELFNGKVLKQLGTVTTTEHENALLRSFDKFTTYFSGFYENRKNVFSAEDISTAIPHRIVQDNFPKFKENCHIFTRLITAVPSLREHFENVKKAIGIFVSTSIEEVFSFPFYNQLLTQTQIDLYNQLLGGISREAGTEKIKGLNEVLNLAIQKNDETAHIIASLPHRFIPLFKQILSDRNTLSFILEEFKSDEEVIQSFCKYKTLLRNENVLETAEALFNELNSIDLTHIFISHKKLETISSALCDHWDTLRNALYERRISELTGKITKSAKEKVQRSLKHEDINLQEIISAAGKELSEAFKQKTSEILSHAHAALDQPLPTTLKKQEEKEILKSQLDSLLGLYHLLDWFAVDESNEVDPEFSARLTGIKLEMEPSLSFYNKARNYATKKPYSVEKFKLNFQRPTLASGWDVNKEKNNGAILFVKNGLYYLGIMPKQKGRYKALSFEPTEKTSEGFDKMYYDYFPDAAKMIPKCSTQLKAVTAHFQTHTTPILLSNNFIEPLEITKEIYDLNNPEKEPKKFQTAYAKKTGDQKGYREALCKWIDFTRDFLSKYTKTTSIDLSSLRPSSQYKDLGEYYAELNPLLYHISFQRIAEKEIMDAVETGKLYLFQIYNKDFAKGHHGKPNLHTLYWTGLFSPENLAKTSIKLNGQAELFYRPKSRMKRMAHRLGEKMLNKKLKDQKTPIPDTLYQELYDYVNHRLSHDLSDEARALLPNVITKEVSHEIIKDRRFTSDKFLFHVPITLNYQAANSPSKFNQRVNAYLKEHPETPIIGIDRGERNLIYITVIDSTGKILEQRSLNTIQQFDYQKKLDNREKERVAARQAWSVVGTIKDLKQGYLSQVIHEIVDLMIHYQAVVVLENLNFGFKSKRTGIAEKAVYQQFEKMLIDKLNCLVLKDYPAEKVGGVLNPYQLTDQFTSFAKMGTQSGFLFYVPAPYTSKIDPLTGFVDPFVWKTIKNHESRKHFLEGFDFLHYDVKTGDFILHFKMNRNLSFQRGLPGFMPAWDIVFEKNETQFDAKGTPFIAGKRIVPVIENHRFTGRYRDLYPANELIALLEEKGIVFRDGSNILPKLLENDDSHAIDTMVALIRSVLQMRNSNAATGEDYINSPVRDLNGVCFDSRFQNPEWPMDADANGAYHIALKGQLLLNHLKESKDLKLQNGISNQDWLAYIQELRNGRSSDDEATADSQHAAPPKKKRKV

SEQ ID NO: 47 - protein, 1363 aa, synthetic construct; identical to SEQ ID NO: 41
  REGION 1..1363: note = Synthetic

SEQ ID NO: 48 - protein, 1361 aa, synthetic construct
  REGION 1..1361: note = Synthetic
MGRDPGKPIPNPLLGLDSTAPKKKRKVGIHGVPAATQFEGFTNLYQVSKTLRFELIPQGKTLKHIQEQGFIEEDKARNDHYKELKPIIDRIYKTYADQCLQLVQLDWENLSAAIDSYRKEKTEETRNALIEEQATYRNAIHDYFIGRTDNLTDAINKRHAEIYKGLFKAELFNGKVLKQLGTVTTTEHENALLRSFDKFTTYFSGFYENRKNVFSAEDISTAIPHRIVQDNFPKFKENCHIFTRLITAVPSLREHFENVKKAIGIFVSTSIEEVFSFPFYNQLLTQTQIDLYNQLLGGISREAGTEKIKGLNEVLNLAIQKNDETAHIIASLPHRFIPLFKQILSDRNTLSFILEEFKSDEEVIQSFCKYKTLLRNENVLETAEALFNELNSIDLTHIFISHKKLETISSALCDHWDTLRNALYERRISELTGKITKSAKEKVQRSLKHEDINLQEIISAAGKELSEAFKQKTSEILSHAHAALDQPLPTTLKKQEEKEILKSQLDSLLGLYHLLDWFAVDESNEVDPEFSARLTGIKLEMEPSLSFYNKARNYATKKPYSVEKFKLNFQMPTLASGWDVNKEKNNGAILFVKNGLYYLGIMPKQKGRYKALSFEPTEKTSEGFDKMYYDYFPDAAKMIPKCSTQLKAVTAHFQTHTTPILLSNNFIEPLEITKEIYDLNNPEKEPKKFQTAYAKKTGDQKGYREALCKWIDFTRDFLSKYTKTTSIDLSSLRPSSQYKDLGEYYAELNPLLYHISFQRIAEKEIMDAVETGKLYLFQIYNKDFAKGHHGKPNLHTLYWTGLFSPENLAKTSIKLNGQAELFYRPKSRMKRMAHRLGEKMLNKKLKDQKTPIPDTLYQELYDYVNHRLSHDLSDEARALLPNVITKEVSHEIIKDRRFTSDKFFFHVPITLNYQAANSPSKFNQRVNAYLKEHPETPIIGIDRGERNLIYITVIDSTGKILEQRSLNTIQQFDYQKKLDNREKERVAARQAWSVVGTIKDLKQGYLSQVIHEIVDLMIHYQAVVVLENLNFGFKSKRTGIAEKAVYQQFEKMLIDKLNCLVLKDYPAEKVGGVLNPYQLTDQFTSFAKMGTQSGFLFYVPAPYTSKIDPLTGFVDPFVWKTIKNHESRKHFLEGFDFLHYDVKTGDFILHFKMNRNLSFQRGLPGFMPAWDIVFEKNETQFDAKGTPFIAGKRIVPVIENHRFTGRYRDLYPANELIALLEEKGIVFRDGSNILPKLLENDDSHAIDTMVALIRSVLQMRNSNAATGEDYINSPVRDLNGVCFDSRFQNPEWPMDADANGAYHIALKGQLLLNHLKESKDLKLQNGISNQDWLAYIQELRNPKKKRKVKLAAALEHHHHHH

SEQ ID NO: 49 - protein, 1307 aa, Acidaminococcus sp.
MTQFEGFTNLYQVSKTLRFELIPQGKTLKHIQEQGFIEEDKARNDHYKELKPIIDRIYKTYADQCLQLVQLDWENLSAAIDSYRKEKTEETRNALIEEQATYRNAIHDYFIGRTDNLTDAINKRHAEIYKGLFKAELFNGKVLKQLGTVTTTEHENALLRSFDKFTTYFSGFYENRKNVFSAEDISTAIPHRIVQDNFPKFKENCHIFTRLITAVPSLREHFENVKKAIGIFVSTSIEEVFSFPFYNQLLTQTQIDLYNQLLGGISREAGTEKIKGLNEVLNLAIQKNDETAHIIASLPHRFIPLFKQILSDRNTLSFILEEFKSDEEVIQSFCKYKTLLRNENVLETAEALFNELNSIDLTHIFISHKKLETISSALCDHWDTLRNALYERRISELTGKITKSAKEKVQRSLKHEDINLQEIISAAGKELSEAFKQKTSEILSHAHAALDQPLPTTLKKQEEKEILKSQLDSLLGLYHLLDWFAVDESNEVDPEFSARLTGIKLEMEPSLSFYNKARNYATKKPYSVEKFKLNFQMPTLASGWDVNKEKNNGAILFVKNGLYYLGIMPKQKGRYKALSFEPTEKTSEGFDKMYYDYFPDAAKMIPKCSTQLKAVTAHFQTHTTPILLSNNFIEPLEITKEIYDLNNPEKEPKKFQTAYAKKTGDQKGYREALCKWIDFTRDFLSKYTKTTSIDLSSLRPSSQYKDLGEYYAELNPLLYHISFQRIAEKEIMDAVETGKLYLFQIYNKDFAKGHHGKPNLHTLYWTGLFSPENLAKTSIKLNGQAELFYRPKSRMKRMAHRLGEKMLNKKLKDQKTPIPDTLYQELYDYVNHRLSHDLSDEARALLPNVITKEVSHEIIKDRRFTSDKFFFHVPITLNYQAANSPSKFNQRVNAYLKEHPETPIIGIDRGERNLIYITVIDSTGKILEQRSLNTIQQFDYQKKLDNREKERVAARQAWSVVGTIKDLKQGYLSQVIHEIVDLMIHYQAVVVLENLNFGFKSKRTGIAEKAVYQQFEKMLIDKLNCLVLKDYPAEKVGGVLNPYQLTDQFTSFAKMGTQSGFLFYVPAPYTSKIDPLTGFVDPFVWKTIKNHESRKHFLEGFDFLHYDVKTGDFILHFKMNRNLSFQRGLPGFMPAWDIVFEKNETQFDAKGTPFIAGKRIVPVIENHRFTGRYRDLYPANELIALLEEKGIVFRDGSNILPKLLENDDSHAIDTMVALIRSVLQMRNSNAATGEDYINSPVRDLNGVCFDSRFQNPEWPMDADANGAYHIALKGQLLLNHLKESKDLKLQNGISNQDWLAYIQELRN

SEQ ID NO: 50 - protein, 1331 aa, synthetic construct
  REGION 1..1331: note = Synthetic
MTQFEGFTNLYQVSKTLRFELIPQGKTLKHIQEQGFIEEDKARNDHYKELKPIIDRIYKTYADQCLQLVQLDWENLSAAIDSYRKEKTEETRNALIEEQATYRNAIHDYFIGRTDNLTDAINKRHAEIYKGLFKAELFNGKVLKQLGTVTTTEHENALLRSFDKFTTYFSGFYENRKNVFSAEDISTAIPHRIVQDNFPKFKENCHIFTRLITAVPSLREHFENVKKAIGIFVSTSIEEVFSFPFYNQLLTQTQIDLYNQLLGGISREAGTEKIKGLNEVLNLAIQKNDETAHIIASLPHRFIPLFKQILSDRNTLSFILEEFKSDEEVIQSFCKYKTLLRNENVLETAEALFNELNSIDLTHIFISHKKLETISSALCDHWDTLRNALYERRISELTGKITKSAKEKVQRSLKHEDINLQEIISAAGKELSEAFKQKTSEILSHAHAALDQPLPTTLKKQEEKEILKSQLDSLLGLYHLLDWFAVDESNEVDPEFSARLTGIKLEMEPSLSFYNKARNYATKKPYSVEKFKLNFQRPTLARGWDVNKEKNNGAILFVKNGLYYLGIMPKQKGRYKALSFEPTEKTSEGFDKMYYDYFPDAAKMIPRCSTQLKAVTAHFQTHTTPILLSNNFIEPLEITKEIYDLNNPEKEPKKFQTAYAKKTGDQKGYREALCKWIDFTRDFLSKYTKTTSIDLSSLRPSSQYKDLGEYYAELNPLLYHISFQRIAEKEIMDAVETGKLYLFQIYNKDFAKGHHGKPNLHTLYWTGLFSPENLAKTSIKLNGQAELFYRPKSRMKRMAARLGEKMLNKKLKDQKTPIPDTLYQELYDYVNHRLSHDLSDEARALLPNVITKEVSHEIIKDRRFTSDKFLFHVPITLNYQAANSPSKFNQRVNAYLKEHPETPIIGIDRGERNLIYITVIDSTGKILEQRSLNTIQQFDYQKKLDNREKERVAARQAWSVVGTIKDLKQGYLSQVIHEIVDLMIHYQAVVVLENLNFGFKSKRTGIAEKAVYQQFEKMLIDKLNCLVLKDYPAEKVGGVLNPYQLTDQFTSFAKMGTQSGFLFYVPAPYTSKIDPLTGFVDPFVWKTIKNHESRKHFLEGFDFLHYDVKTGDFILHFKMNRNLSFQRGLPGFMPAWDIVFEKNETQFDAKGTPFIAGKRIVPVIENHRFTGRYRDLYPANELIALLEEKGIVFRDGSNILPKLLENDDSHAIDTMVALIRSVLQMRNSNAATGEDYINSPVRDLNGVCFDSRFQNPEWPMDADANGAYHIALKGQLLLNHLKESKDLKLQNGISNQDWLAYIQELRNGGSPAAKRVKLDGGSPAAKRVKLD

SEQ ID NO: 51 - protein, 1331 aa, synthetic construct
  REGION 1..1331: note = Synthetic
MTQFEGFTNLYQVSKTLRFELIPQGKTLKHIQEQGFIEEDKARNDHYKELKPIIDRIYKTYADQCLQLVQLDWENLSAAIDSYRKEKTEETRNALIEEQATYRNAIHDYFIGRTDNLTDAINKRHAEIYKGLFKAELFNGKVLKQLGTVTTTEHENALLRSFDKFTTYFSGFYENRKNVFSAEDISTAIPHRIVQDNFPKFKENCHIFTRLITAVPSLREHFENVKKAIGIFVSTSIEEVFSFPFYNQLLTQTQIDLYNQLLGGISREAGTEKIKGLNEVLNLAIQKNDETAHIIASLPHRFIPLFKQILSDRNTLSFILEEFKSDEEVIQSFCKYKTLLRNENVLETAEALFNELNSIDLTHIFISHKKLETISSALCDHWDTLRNALYERRISELTGKITKSAKEKVQRSLKHEDINLQEIISAAGKELSEAFKQKTSEILSHAHAALDQPLPTTLKKQEEKEILKSQLDSLLGLYHLLDWFAVDESNEVDPEFSARLTGIKLEMEPSLSFYNKARNYATKKPYSVEKFKLNFQRPTLARGWDVNKEKNNGAILFVKNGLYYLGIMPKQKGRYKALSFEPTEKTSEGFDKMYYDYFPDAAKMIPRCSTQLKAVTAHFQTHTTPILLSNNFIEPLEITKEIYDLNNPEKEPKKFQTAYAKKTGDQKGYREALCKWIDFTRDFLSKYTKTTSIDLSSLRPSSQYKDLGEYYAELNPLLYHISFQRIAEKEIMDAVETGKLYLFQIYNKDFAKGHHGKPNLHTLYWTGLFSPENLAKTSIKLNGQAELFYRPKSRMKRMAARLGEKMLNKKLKDQKTPIPDTLYQELYDYVNHRLSHDLSDEARALLPNVITKEVSHEIIKDRRFTSDKFLFHVPITLNYQAANSPSKFNQRVNAYLKEHPETPIIGIDRGERNLIYITVIDSTGKILEQRSLNTIQQFDYQKKLDNREKERVAARQAWSVVGTIKDLKQGYLSQVIHEIVDLMIHYQAVVVLENLNFGFKSKRTGIAEKAVYQQFEKMLIDKLNCLVLKDYPAEKVGGVLNPYQLTDQFTSFAKMGTQSGFLFYVPAPYTSKIDPLTGFVDPFVWKTIKNHESRKHFLEGFDFLHYDVKTGDFILHFKMNRNLSFQRGLPGFMPAWDIVFEKNETQFDAKGTPFIAGKRIVPVIENHRFTGRYRDLYPANELIALLEEKGIVFRDGSNILPKLLENDDSHAIDTMVALIRSVLQMRNSNAATGEDYINSPVRDLNGVCFDSRFQNPEWPMDADANGAYHIALKGQLLLNHLKESKDLKLQNGISNQDWLAYIQELRNGRSSDDEATADSQHAAPPKKKRKV

SEQ ID NO: 52 - protein, 1331 aa, synthetic construct
  REGION 1..1331: note = Synthetic
MTQFEGFTNLYQVSKTLRFELIPQGKTLKHIQEQGFIEEDKARNDHYKELKPIIDRIYKTYADQCLQLVQLDWENLSAAIDSYRKEKTEETRNALIEEQATYRNAIHDYFIGRTDNLTDAINKRHAEIYKGLFKAELFNGKVLKQLGTVTTTEHENALLRSFDKFTTYFSGFYENRKNVFSAEDISTAIPHRIVQDNFPKFKENCHIFTRLITAVPSLREHFENVKKAIGIFVSTSIEEVFSFPFYNQLLTQTQIDLYNQLLGGISREAGTEKIKGLNEVLNLAIQKNDETAHIIASLPHRFIPLFKQILSDRNTLSFILEEFKSDEEVIQSFCKYKTLLRNENVLETAEALFNELNSIDLTHIFISHKKLETISSALCDHWDTLRNALYERRISELTGKITKSAKEKVQRSLKHEDINLQEIISAAGKELSEAFKQKTSEILSHAHAALDQPLPTTLKKQEEKEILKSQLDSLLGLYHLLDWFAVDESNEVDPEFSARLTGIKLEMEPSLSFYNKARNYATKKPYSVEKFKLNFQRPTLARGWDVNVEKNRGAILFVKNGLYYLGIMPKQKGRYKALSFEPTEKTSEGFDKMYYDYFPDAAKMIPKCSTQLKAVTAHFQTHTTPILLSNNFIEPLEITKEIYDLNNPEKEPKKFQTAYAKKTGDQKGYREALCKWIDFTRDFLSKYTKTTSIDLSSLRPSSQYKDLGEYYAELNPLLYHISFQRIAEKEIMDAVETGKLYLFQIYNKDFAKGHHGKPNLHTLYWTGLFSPENLAKTSIKLNGQAELFYRPKSRMKRMAARLGEKMLNKKLKDQKTPIPDTLYQELYDYVNHRLSHDLSDEARALLPNVITKEVSHEIIKDRRFTSDKFLFHVPITLNYQAANSPSKFNQRVNAYLKEHPETPIIGIDRGERNLIYITVIDSTGKILEQRSLNTIQQFDYQKKLDNREKERVAARQAWSVVGTIKDLKQGYLSQVIHEIVDLMIHYQAVVVLENLNFGFKSKRTGIAEKAVYQQFEKMLIDKLNCLVLKDYPAEKVGGVLNPYQLTDQFTSFAKMGTQSGFLFYVPAPYTSKIDPLTGFVDPFVWKTIKNHESRKHFLEGFDFLHYDVKTGDFILHFKMNRNLSFQRGLPGFMPAWDIVFEKNETQFDAKGTPFIAGKRIVPVIENHRFTGRYRDLYPANELIALLEEKGIVFRDGSNILPKLLENDDSHAIDTMVALIRSVLQMRNSNAATGEDYINSPVRDLNGVCFDSRFQNPEWPMDADANGAYHIALKGQLLLNHLKESKDLKLQNGISNQDWLAYIQELRNGGSPAAKRVKLDGGSPAAKRVKLD

SEQ ID NO: 53 - protein, 1331 aa, synthetic construct
  REGION 1..1331: note = Synthetic
MTQFEGFTNLYQVSKTLRFELIPQGKTLKHIQEQGFIEEDKARNDHYKELKPIIDRIYKTYADQCLQLVQLDWENLSAAIDSYRKEKTEETRNALIEEQATYRNAIHDYFIGRTDNLTDAINKRHAEIYKGLFKAELFNGKVLKQLGTVTTTEHENALLRSFDKFTTYFSGFYENRKNVFSAEDISTAIPHRIVQDNFPKFKENCHIFTRLITAVPSLREHFENVKKAIGIFVSTSIEEVFSFPFYNQLLTQTQIDLYNQLLGGISREAGTEKIKGLNEVLNLAIQKNDETAHIIASLPHRFIPLFKQILSDRNTLSFILEEFKSDEEVIQSFCKYKTLLRNENVLETAEALFNELNSIDLTHIFISHKKLETISSALCDHWDTLRNALYERRISELTGKITKSAKEKVQRSLKHEDINLQEIISAAGKELSEAFKQKTSEILSHAHAALDQPLPTTLKKQEEKEILKSQLDSLLGLYHLLDWFAVDESNEVDPEFSARLTGIKLEMEPSLSFYNKARNYATKKPYSVEKFKLNFQRPTLARGWDVNVEKNRGAILFVKNGLYYLGIMPKQKGRYKALSFEPTEKTSEGFDKMYYDYFPDAAKMIPKCSTQLKAVTAHFQTHTTPILLSNNFIEPLEITKEIYDLNNPEKEPKKFQTAYAKKTGDQKGYREALCKWIDFTRDFLSKYTKTTSIDLSSLRPSSQYKDLGEYYAELNPLLYHISFQRIAEKEIMDAVETGKLYLFQIYNKDFAKGHHGKPNLHTLYWTGLFSPENLAKTSIKLNGQAELFYRPKSRMKRMAARLGEKMLNKKLKDQKTPIPDTLYQELYDYVNHRLSHDLSDEARALLPNVITKEVSHEIIKDRRFTSDKFLFHVPITLNYQAANSPSKFNQRVNAYLKEHPETPIIGIDRGERNLIYITVIDSTGKILEQRSLNTIQQFDYQKKLDNREKERVAARQAWSVVGTIKDLKQGYLSQVIHEIVDLMIHYQAVVVLENLNFGFKSKRTGIAEKAVYQQFEKMLIDKLNCLVLKDYPAEKVGGVLNPYQLTDQFTSFAKMGTQSGFLFYVPAPYTSKIDPLTGFVDPFVWKTIKNHESRKHFLEGFDFLHYDVKTGDFILHFKMNRNLSFQRGLPGFMPAWDIVFEKNETQFDAKGTPFIAGKRIVPVIENHRFTGRYRDLYPANELIALLEEKGIVFRDGSNILPKLLENDDSHAIDTMVALIRSVLQMRNSNAATGEDYINSPVRDLNGVCFDSRFQNPEWPMDADANGAYHIALKGQLLLNHLKESKDLKLQNGISNQDWLAYIQELRNGRSSDDEATADSQHAAPPKKKRKV

SEQ ID NO: 54 - protein, 1331 aa, synthetic construct; identical to SEQ ID NO: 44
  REGION 1..1331: note = Synthetic

SEQ ID NO: 55 - RNA, 4287 nt, synthetic construct
  misc_feature 1..4287: note = Synthetic
  source 1..4287: mol_type = other RNA
aggaaataagagagaaaagaagagtaagaagaaatataagagccaccatgacacagttcgagggctttaccaacctgtatcaggtgagcaagacactgcggtttgagctgatcccacagggcaagaccctgaagcacatccaggagcagggcttcatcgaggaggacaaggcccgcaatgatcactacaaggagctgaagcccatcatcgatcggatctacaagacctatgccgaccagtgcctgcagctggtgcagctggattgggagaacctgagcgccgccatcgactcctatagaaaggagaaaaccgaggagacaaggaacgccctgatcgaggagcaggccacatatcgcaatgccatccacgactacttcatcggccggacagacaacctgaccgatgccatcaataagagacacgccgagatctacaagggcctgttcaaggccgagctgtttaatggcaaggtgctgaagcagctgggcaccgtgaccacaaccgagcacgagaacgccctgctgcggagcttcgacaagtttacaacctacttctccggcttttatgagaacaggaagaacgtgttcagcgccgaggatatcagcacagccatcccacaccgcatcgtgcaggacaacttccccaagtttaaggagaattgtcacatcttcacacgcctgatcaccgccgtgcccagcctgcgggagcactttgagaacgtgaagaaggccatcggcatcttcgtgagcacctccatcgaggaggtgttttccttccctttttataaccagctgctgacacagacccagatcgacctgtataaccagctgctgggaggaatctctcgggaggcaggcaccgagaagatcaagggcctgaacgaggtgctgaatctggccatccagaagaatgatgagacagcccacatcatcgcctccctgccacacagattcatccccctgtttaagcagatcctgtccgataggaacaccctgtctttcatcctggaggagtttaagagcgacgaggaagtgatccagtccttctgcaagtacaagacactgctgagaaacgagaacgtgctggagacagccgaggccctgtttaacgagctgaacagcatcgacctgacacacatcttcatcagccacaagaagctggagacaatcagcagcgccctgtgcgaccactgggatacactgaggaatgccctgtatgagcggagaatctccgagctgacaggcaagatcaccaagtctgccaaggagaaggtgcagcgcagcctgaagcacgaggatatcaacctgcaggagatcatctctgccgcaggcaaggagctgagcgaggccttcaagcagaaaaccagcgagatcctgtcccacgcacacgccgccctggatcagccactgcctacaaccctgaagaagcaggaggagaaggagatcctgaagtctcagctggacagcctgctgggcctgtaccacctgctggactggtttgccgtggatgagtccaacgaggtggaccccgagttctctgcccggctgaccggcatcaagctggagatggagccttctctgagcttctacaacaaggccagaaattatgccaccaagaagccctactccgtggagaagttcaagctgaactttcagcggcctacactggcctctggctgggacgtgaataaggagaagaacaatggcgccatcctgtttgtgaagaacggcctgtactatctgggcatcatgccaaagcagaagggcaggtataaggccctgagcttcgagcccacagagaaaaccagcgagggctttgataagatgtactatgactacttccctgatgccgccaagatgatcccaaagtgcagcacccagctgaaggccgtgacagcccactttcagacccacacaacccccatcctgctgtccaacaatttcatcgagcctctggagatcacaaaggagatctacgacctgaacaatcctgagaaggagccaaagaagtttcagacagcctacgccaagaaaaccggcgaccagaagggctacagagaggccctgtgcaagtggatcgacttcacaagggattttctgtccaagtataccaagacaacctctatcgatctgtctagcctgcggccatcctctcagtataaggacctgggcgagtactatgccgagctgaatcccctgctgtaccacatcagcttccagagaatcgccgagaaggagatcatggatgccgtggagacaggcaagctgtacctgttccagatctataacaaggactttgccaagggccaccacggcaagcctaatctgcacacactgtattggaccggcctgttttctccagagaacctggccaagacaagcatcaagctgaatggccaggccgagctgttctaccgccctaagtccaggatgaagaggatggcacaccggctgggagagaagatgctgaacaagaagctgaaggatcagaaaaccccaatccccgacaccctgtaccaggagctgtacgactatgtgaatcacagactgtcccacgacctgtctgatgaggccagggccctgctgcccaacgtgatcaccaaggaggtgtctcacgagatcatcaaggataggcgctttaccagcgacaagttcttgttccacgtgcctatcacactgaactatcaggccgccaattccccatctaagttcaaccagagggtgaatgcctacctgaaggagcaccccgagacacctatcatcggcatcgatcggggcgagagaaacctgatctatatcacagtgatcgactccaccggcaagatcctggagcagcggagcctgaacaccatccagcagtttgattaccagaagaagctggacaacagggagaaggagagggtggcagcaaggcaggcctggtctgtggtgggcacaatcaaggatctgaagcagggctatctgagccaggtcatccacgagatcgtggacctgatgatccactaccaggccgtggtggtgctggagaacctgaatttcggctttaagagcaagaggaccggcatcgccgagaaggccgtgtaccagcagttcgagaagatgctgatcgataagctgaattgcctggtgctgaaggactatccagcagagaaagtgggaggcgtgctgaacccataccagctgacagaccagttcacctcctttgccaagatgggcacccagtctggcttcctgttttacgtgcctgccccatatacatctaagatcgatcccctgaccggcttcgtggaccccttcgtgtggaaaaccatcaagaatcacgagagccgcaagcacttcctggagggcttcgactttctgcactacgacgtgaaaaccggcgacttcatcctgcactttaagatgaacagaaatctgtccttccagaggggcctgcccggctttatgcctgcatgggatatcgtgttcgagaagaacgagacacagtttgacgccaagggcacccctttcatcgccggcaagagaatcgtgccagtgatcgagaatcacagattcaccggcagataccgggacctgtatcctgccaacgagctgatcgccctgctggaggagaagggcatcgtgttcagggatggctccaacatcctgccaaagctgctggagaatgacgattctcacgccatcgacaccatggtggccctgatccgcagcgtgctgcagatgcggaactccaatgccgccacaggcgaggactatatcaacagccccgtgcgcgatctgaatggcgtgtgcttcgactcccggtttcagaacccagagtggcccatggacgccgatgccaatggcgcctaccacatcgccctgaagggccagctgctgctgaatcacctgaaggagagcaaggatctgaagctgcagaacggcatctccaatcaggactggctggcctacatccaggagctgcgcaacggtcgtagcagtgatgatgaagcaaccgcagatagccagcatgcagcacccaagaagaagaggaaagtctaatagtgaatggtttatattgcggccgcttaattaagctgccttctgcggggcttgccttctggccatgcccttcttctctcccttgcacctgtacctcttggtctttgaataaagcctgagtaggaagaaaaaaaaaaaaaaaaaaaaaaaaaaaaaaaaaaaaaaaaaaaaaaaaaaaaaaaaaaaaaaaaaaaaaaaaaaaaaaaaaaaaaaaaaaaaaaaaaaaaaaaaaaaaaaaaaaaaaaaa

SEQ ID NO: 56 - DNA, 34 bp, synthetic construct
  misc_feature 1..34: note = Synthetic
  modified_base 1: mod_base = OTHER; note = 5' Phosphorylation modification
  modified_base 33: mod_base = OTHER; note = phosphorothioate bond
  source 1..34: mol_type = other DNA
gtttaattgagttgtcatatgttaataacggtat

SEQ ID NO: 57 - DNA, 34 bp, synthetic construct
  misc_feature 1..34: note = Synthetic
  modified_base 1: mod_base = OTHER; note = 5' Phosphorylation modification
  modified_base 33: mod_base = OTHER; note = phosphorothioate bond
  source 1..34: mol_type = other DNA
ataccgttattaacatatgacaactcaattaaac

SEQ ID NO: 58 - DNA, 29 bp, synthetic construct
  misc_feature 1..29: note = Synthetic
  source 1..29: mol_type = other DNA
aatgatacggcgaccaccgagatctacac

SEQ ID NO: 59 - DNA, 68 bp, synthetic construct
  misc_feature 1..68: note = Synthetic
  source 1..68: mol_type = other DNA
gtgactggagttcagacgtgtgctcttccgatctataccgttattaacatatgacaactcaattaaac

SEQ ID NO: 60 - DNA, 68 bp, synthetic construct
  misc_feature 1..68: note = Synthetic
  source 1..68: mol_type = other DNA
gtgactggagttcagacgtgtgctcttccgatctgtttaattgagttgtcatatgttaataacggtat

SEQ ID NO: 61 - DNA, 20 bp, Homo sapiens
  source 1..20: mol_type = genomic DNA
acgtggcgtgaacatctgcc

SEQ ID NO: 62 - DNA, 20 bp, Homo sapiens
  source 1..20: mol_type = genomic DNA
ctgggcagggacgggactcc

SEQ ID NO: 63 - DNA, 20 bp, Homo sapiens
  source 1..20: mol_type = genomic DNA
gaggtctcaggaagggttct

SEQ ID NO: 64 - DNA, 20 bp, Homo sapiens
  source 1..20: mol_type = genomic DNA
cgaggtctcaggaagggttc

SEQ ID NO: 65 - DNA, 20 bp, Homo sapiens
  source 1..20: mol_type = genomic DNA
aacccttcctgagacctcgc

SEQ ID NO: 66 - DNA, 20 bp, Homo sapiens
  source 1..20: mol_type = genomic DNA
ggccggcgaggtctcaggaa

SEQ ID NO: 67 - DNA, 20 bp, Homo sapiens
  source 1..20: mol_type = genomic DNA
aggccggcgaggtctcagga

SEQ ID NO: 68 - DNA, 20 bp, Homo sapiens
  source 1..20: mol_type = genomic DNA
aacaaggccggcgaggtctc

SEQ ID NO: 69 - DNA, 20 bp, Homo sapiens
  source 1..20: mol_type = genomic DNA
tgaataaaacaaggccggcg

SEQ ID NO: 70 - DNA, 20 bp, Homo sapiens
  source 1..20: mol_type = genomic DNA
gtctttgaataaaacaaggc

SEQ ID NO: 71 - DNA, 20 bp, Homo sapiens
  source 1..20: mol_type = genomic DNA
ctctgtctttgaataaaaca

SEQ ID NO: 72 - DNA, 20 bp, Homo sapiens
  source 1..20: mol_type = genomic DNA
agctctggcaggcaatgctt

SEQ ID NO: 73 - DNA, 20 bp, Homo sapiens
  source 1..20: mol_type = genomic DNA
atataaaacaaagctctggc

SEQ ID NO: 74 - DNA, 20 bp, Homo sapiens
  source 1..20: mol_type = genomic DNA
aaatatataaaacaaagctc

SEQ ID NO: 75 - DNA, 20 bp, Homo sapiens
  source 1..20: mol_type = genomic DNA
attcatctgggaggcagaac

SEQ ID NO: 76 - DNA, 20 bp, Homo sapiens
  source 1..20: mol_type = genomic DNA
ctgggaggcagaacaggctt

SEQ ID NO: 77 - DNA, 20 bp, Homo sapiens
  source 1..20: mol_type = genomic DNA
ttcggacagtgcccatgcaa

SEQ ID NO: 78 - DNA, 20 bp, Homo sapiens
  source 1..20: mol_type = genomic DNA
acagtgcccatgcaatggct

SEQ ID NO: 79 - DNA, 20 bp, Homo sapiens
  source 1..20: mol_type = genomic DNA
cagtgcccatgcaatggctt

SEQ ID NO: 80 - DNA, 20 bp, Homo sapiens
  source 1..20: mol_type = genomic DNA
gcccatgcaatggcttgggt

SEQ ID NO: 81 - DNA, 20 bp, Homo sapiens
  source 1..20: mol_type = genomic DNA
cccatgcaatggcttgggtt

SEQ ID NO: 82 - DNA, 20 bp, Homo sapiens
  source 1..20: mol_type = genomic DNA
cccaacccaagccattgcat

SEQ ID NO: 83 - DNA, 20 bp, Homo sapiens
  source 1..20: mol_type = genomic DNA
tcccaacccaagccattgca

SEQ ID NO: 84 - DNA, 20 bp, Homo sapiens
  source 1..20: mol_type = genomic DNA
gtttcttcctttcctcgtga

SEQ ID NO: 85 - DNA, 20 bp, Homo sapiens
  source 1..20: mol_type = genomic DNA
ctcttatccttcacgaggaa

SEQ ID NO: 86 - DNA, 20 bp, Homo sapiens
  source 1..20: mol_type = genomic DNA
tgtttctcttatccttcacg

SEQ ID NO: 87 - DNA, 20 bp, Homo sapiens
  source 1..20: mol_type = genomic DNA
aggataagagaaacaggccc

SEQ ID NO: 88 - DNA, 20 bp, Homo sapiens
  source 1..20: mol_type = genomic DNA
ggataagagaaacaggcccg

SEQ ID NO: 89 - DNA, 20 bp, Homo sapiens
  source 1..20: mol_type = genomic DNA
gataagagaaacaggcccgg

SEQ ID NO: 90 - DNA, 20 bp, Homo sapiens
  source 1..20: mol_type = genomic DNA
ataagagaaacaggcccggg

SEQ ID NO: 91 - DNA, 20 bp, Homo sapiens
  source 1..20: mol_type = genomic DNA
gaaacaggcccggggggacc

SEQ ID NO: 92 - DNA, 20 bp, Homo sapiens
  source 1..20: mol_type = genomic DNA
ggtgtcatcctggtcccccc

SEQ ID NO: 93 - DNA, 20 bp, Homo sapiens
  source 1..20: mol_type = genomic DNA
aggtgtcatcctggtccccc

SEQ ID NO: 94 - DNA, 20 bp, Homo sapiens
  source 1..20: mol_type = genomic DNA
gagaaatggaggtgtcatcc

SEQ ID NO: 95 - DNA, 20 bp, Homo sapiens
  source 1..20: mol_type = genomic DNA
tgacacctccatttctctcc

SEQ ID NO: 96 - DNA, 20 bp, Homo sapiens
  source 1..20: mol_type = genomic DNA
aacttcctggagagaaatgg

SEQ ID NO: 97 - DNA, 20 bp, Homo sapiens
  source 1..20: mol_type = genomic DNA
caaaacttcctggagagaaa

SEQ ID NO: 98 - DNA, 20 bp, Homo sapiens
  source 1..20: mol_type = genomic DNA
gagagaaactcaaaacttcc

SEQ ID NO: 99 - DNA, 20 bp, Homo sapiens
  source 1..20: mol_type = genomic DNA
gtttgaggattgtgtcacgg

SEQ ID NO: 100 - DNA, 20 bp, Homo sapiens
  source 1..20: mol_type = genomic DNA
cgtgacacaatcctcaaaca

SEQ ID NO: 101 - DNA, 20 bp, Homo sapiens
  source 1..20: mol_type = genomic DNA
catgtttgaggattgtgtca

SEQ ID NO: 102 - DNA, 20 bp, Homo sapiens
  source 1..20: mol_type = genomic DNA
cctcaaacatggaagatgaa

SEQ ID NO: 103 - DNA, 20 bp, Homo sapiens
  source 1..20: mol_type = genomic DNA
ctcaaacatggaagatgaaa

SEQ ID NO: 104 - DNA, 20 bp, Homo sapiens
  source 1..20: mol_type = genomic DNA
tcaaacatggaagatgaaag

SEQ ID NO: 105 - DNA, 20 bp, Homo sapiens
  source 1..20: mol_type = genomic DNA
cctttcatcttccatgtttg

SEQ ID NO: 106 - DNA, 20 bp, Homo sapiens
  source 1..20: mol_type = genomic DNA
gtcaggcccagagaagcaag

SEQ ID NO: 107 - DNA, 20 bp, Homo sapiens
  source 1..20: mol_type = genomic DNA
tgaaagccacttgcttctct

SEQ ID NO: 108 - DNA, 20 bp, Homo sapiens
  source 1..20: mol_type = genomic DNA
ttgaaagccacttgcttctc

SEQ ID NO: 109 - DNA, 20 bp, Homo sapiens
  source 1..20: mol_type = genomic DNA
tttcaacacacaacagcaga

SEQ ID NO: 110 - DNA, 20 bp, Homo sapiens
  source 1..20: mol_type = genomic DNA
acaacagcagatggcaccaa

SEQ ID NO: 111 - DNA, 20 bp, Homo sapiens
  source 1..20: mol_type = genomic DNA
caacagcagatggcaccaac

SEQ ID NO: 112 - DNA, 20 bp, Homo sapiens
  source 1..20: mol_type = genomic DNA
atggcaccaacgggaccccc

SEQ ID NO: 113 - DNA, 20 bp, Homo sapiens
  source 1..20: mol_type = genomic DNA
gcagggccagggggtcccgt

SEQ ID NO: 114 - DNA, 20 bp, Homo sapiens
  source 1..20: mol_type = genomic DNA
gtggatgaggcagggccagg

SEQ ID NO: 115 - DNA, 20 bp, Homo sapiens
  source 1..20: mol_type = genomic DNA
agagattggtggatgaggca

SEQ ID NO: 116 - DNA, 20 bp, Homo sapiens
  source 1..20: mol_type = genomic DNA
ggcttagagattggtggatg

SEQ ID NO: 117 - DNA, 20 bp, Homo sapiens
  source 1..20: mol_type = genomic DNA
gggtttggcttagagattgg

SEQ ID NO: 118 - DNA, 20 bp, Homo sapiens
  source 1..20: mol_type = genomic DNA
taggggtttggcttagagat

SEQ ID NO: 119 - DNA, 20 bp, Homo sapiens
  source 1..20: mol_type = genomic DNA
taagccaaacccctaaactc

SEQ ID NO: 120 - DNA, 20 bp, Homo sapiens
  source 1..20: mol_type = genomic DNA
gactcctgagtttaggggtt

SEQ ID NO: 121 - DNA, 20 bp, Homo sapiens
  source 1..20: mol_type = genomic DNA
acgttgactcctgagtttag

SEQ ID NO: 122 - DNA, 20 bp, Homo sapiens
  source 1..20: mol_type = genomic DNA
cacgttgactcctgagttta

SEQ ID NO: 123 - DNA, 20 bp, Homo sapiens
  source 1..20: mol_type = genomic DNA
acacgttgactcctgagttt

SEQ ID NO: 124 - DNA, 20 bp, Homo sapiens
  source 1..20: mol_type = genomic DNA
gcaagccttgctagacagcc

SEQ ID NO: 125 - DNA, 20 bp, Homo sapiens
  source 1..20: mol_type = genomic DNA
gctaacctggctgtctagca

SEQ ID NO: 126 - DNA, 20 bp, Homo sapiens
  source 1..20: mol_type = genomic DNA
tgacagggcaaaggctaacc

SEQ ID NO: 127 - DNA, 20 bp, Homo sapiens
  source 1..20: mol_type = genomic DNA
attcgggggtgacagggcaa

SEQ ID NO: 128 - DNA, 20 bp, Homo sapiens
  source 1..20: mol_type = genomic DNA
gtcatgattcgggggtgaca

SEQ ID NO: 129 - DNA, 20 bp, Homo sapiens
  source 1..20: mol_type = genomic DNA
ggtcatgattcgggggtgac

SEQ ID NO: 130 - DNA, 20 bp, Homo sapiens
  source 1..20: mol_type = genomic DNA
ctgggtgggtcatgattcgg

SEQ ID NO: 131 - DNA, 20 bp, Homo sapiens
  source 1..20: mol_type = genomic DNA
actgggtgggtcatgattcg

SEQ ID NO: 132 - DNA, 20 bp, Homo sapiens
  source 1..20: mol_type = genomic DNA
cactgggtgggtcatgattc

SEQ ID NO: 133 - DNA, 20 bp, Homo sapiens
  source 1..20: mol_type = genomic DNA
acactgggtgggtcatgatt

SEQ ID NO: 134 - DNA, 20 bp, Homo sapiens
  source 1..20: mol_type = genomic DNA
gacccacccagtgtctttcg

SEQ ID NO: 135 - DNA, 20 bp, Homo sapiens
  source 1..20: mol_type = genomic DNA
ccacccagtgtctttcgagg

SEQ ID NO: 136 - DNA, 20 bp, Homo sapiens
  source 1..20: mol_type = genomic DNA
cacccagtgtctttcgaggt

SEQ ID NO: 137 - DNA, 20 bp, Homo sapiens
  source 1..20: mol_type = genomic DNA
cacctcgaaagacactgggt

SEQ ID NO: 138 - DNA, 20 bp, Homo sapiens
  source 1..20: mol_type = genomic DNA
aacccacctcgaaagacact

SEQ ID NO: 139 - DNA, 20 bp, Homo sapiens
  source 1..20: mol_type = genomic DNA
aaacccacctcgaaagacac

SEQ ID NO: 140 - DNA, 20 bp, Homo sapiens
  source 1..20: mol_type = genomic DNA
gtttgtaccttccttaagcc

SEQ ID NO: 141 - DNA, 20 bp, Homo sapiens
  source 1..20: mol_type = genomic DNA
taccttccttaagccaggaa

SEQ ID NO: 142 - DNA, 20 bp, Homo sapiens
  source 1..20: mol_type = genomic DNA
accttccttaagccaggaaa

SEQ ID NO: 143 - DNA, 20 bp, Homo sapiens
  source 1..20: mol_type = genomic DNA
tccctttcctggcttaagga

SEQ ID NO: 144 - DNA, 20 bp, Homo sapiens
  source 1..20: mol_type = genomic DNA
tgaatccctttcctggctta

SEQ ID NO: 145 - DNA, 20 bp, Homo sapiens
  source 1..20: mol_type = genomic DNA
taagccaggaaagggattca

SEQ ID NO: 146 - DNA, 20 bp, Homo sapiens
  source 1..20: mol_type = genomic DNA
aggaaagggattcatggcgt

SEQ ID NO: 147 - DNA, 20 bp, Homo sapiens
  source 1..20: mol_type = genomic DNA
gacgccatgaatccctttcc

SEQ ID NO: 148 - DNA, 20 bp, Homo sapiens
  source 1..20: mol_type = genomic DNA
tcatggcgtcggaaatgatc

SEQ ID NO: 149 - DNA, 20 bp, Homo sapiens
  source 1..20: mol_type = genomic DNA
aaatgatctggctgaatccg

SEQ ID NO: 150 - DNA, 20 bp, Homo sapiens
  source 1..20: mol_type = genomic DNA
tgatctggctgaatccgtgg

SEQ ID NO: 151 - DNA, 20 bp, Homo sapiens
  source 1..20: mol_type = genomic DNA
gtttggtctcggtgccacca

SEQ ID NO: 152 - DNA, 20 bp, Homo sapiens
  source 1..20: mol_type = genomic DNA
ttggtgaatgagtttggtct

SEQ ID NO: 153 - DNA, 20 bp, Homo sapiens
  source 1..20: mol_type = genomic DNA
catcatttggtgaatgagtt

SEQ ID NO: 154 - DNA, 20 bp, Homo sapiens
  source 1..20: mol_type = genomic DNA
caaatgatgccacttcccag

SEQ ID NO: 155 - DNA, 20 bp, Homo sapiens
  source 1..20: mol_type = genomic DNA
ctctgggaagtggcatcatt

SEQ ID NO: 156 - DNA, 20 bp, Homo sapiens
  source 1..20: mol_type = genomic DNA
caggctctgcctctgggaag

SEQ ID NO: 157 - DNA, 20 bp, Homo sapiens
  source 1..20: mol_type = genomic DNA
agaggcagagcctgagtcac

SEQ ID NO: 158 - DNA, 20 bp, Homo sapiens
  source 1..20: mol_type = genomic DNA
agtgactcaggctctgcctc

SEQ ID NO: 159 - DNA, 20 bp, Homo sapiens
  source 1..20: mol_type = genomic DNA
ttaagggtgaccagtgactc

SEQ ID NO: 160 - DNA, 20 bp, Homo sapiens
  source 1..20: mol_type = genomic DNA
caggcacttaataaatatta

SEQ ID NO: 161 - DNA, 20 bp, Homo sapiens
  source 1..20: mol_type = genomic DNA
tattaagtgcctgagacacc

SEQ ID NO: 162 - DNA, 20 bp, Homo sapiens
  source 1..20: mol_type = genomic DNA
cctgagacacccggttacct

SEQ ID NO: 163 - DNA, 20 bp, Homo sapiens
  source 1..20: mol_type = genomic DNA
ccaaggtaaccgggtgtctc

SEQ ID NO: 164 - DNA, 20 bp, Homo sapiens
  source 1..20: mol_type = genomic DNA
acccggttaccttggccgtg

SEQ ID NO: 165 - DNA, 20 bp, Homo sapiens
  source 1..20: mol_type = genomic DNA
tcctcacggccaaggtaacc

SEQ ID NO: 166 - DNA, 20 bp, Homo sapiens
  source 1..20: mol_type = genomic DNA
gtcctcacggccaaggtaac

SEQ ID NO: 167 - DNA, 20 bp, Homo sapiens
  source 1..20: mol_type = genomic DNA
accttggccgtgaggacacg

SEQ ID NO: 168 - DNA, 20 bp, Homo sapiens
  source 1..20: mol_type = genomic DNA
gccacgtgtcctcacggcca

SEQ ID NO: 169 - DNA, 20 bp, Homo sapiens
  source 1..20: mol_type = genomic DNA
gtgcaggccacgtgtcctca

SEQ ID NO: 170 - DNA, 20 bp, Homo sapiens
  source 1..20: mol_type = genomic DNA
aggacacgtggcctgcaccc

SEQ ID NO: 171 - DNA, 20 bp, Homo sapiens
  source 1..20: mol_type = genomic DNA
acgtggcctgcacccaggtg

SEQ ID NO: 172 - DNA, 20 bp, Homo sapiens
  source 1..20: mol_type = genomic DNA
tgcacccaggtgtggctgtc

SEQ ID NO: 173 - DNA, 20 bp, Homo sapiens
  source 1..20: mol_type = genomic DNA
tgacagccacacctgggtgc

SEQ ID NO: 174 - DNA, 20 bp, Homo sapiens
  source 1..20: mol_type = genomic DNA
gtgtcctgacagccacacct

SEQ ID NO: 175 - DNA, 20 bp, Homo sapiens
  source 1..20: mol_type = genomic DNA
ggtgtcctgacagccacacc

SEQ ID NO: 176 - DNA, 20 bp, Homo sapiens
  source 1..20: mol_type = genomic DNA
tggctgtcaggacaccagcc

SEQ ID NO: 177 - DNA, 20 bp, Homo sapiens
  source 1..20: mol_type = genomic DNA
cgggaggatgggcaccaggc

SEQ ID NO: 178 - DNA, 20 bp, Homo sapiens
  source 1..20: mol_type = genomic DNA
gggtcgggaggatgggcacc

SEQ ID NO: 179 - DNA, 20 bp, Homo sapiens
  source 1..20: mol_type = genomic DNA
tgggtaggggtcgggaggat

SEQ ID NO: 180 - DNA, 20 bp, Homo sapiens
  source 1..20: mol_type = genomic DNA
ggaagtgggtaggggtcggg

SEQ ID NO: 181 - DNA, 20 bp, Homo sapiens
  source 1..20: mol_type = genomic DNA
cctacccacttccattcccg

SEQ ID NO: 182 - DNA, 20 bp, Homo sapiens
  source 1..20: mol_type = genomic DNA
acgggaatggaagtgggtag

SEQ ID NO: 183 - DNA, 20 bp, Homo sapiens
  source 1..20: mol_type = genomic DNA
cacgggaatggaagtgggta

SEQ ID NO: 184 - DNA, 20 bp, Homo sapiens
  source 1..20: mol_type = genomic DNA
ccacgggaatggaagtgggt

SEQ ID NO: 185 - DNA, 20 bp, Homo sapiens
  source 1..20: mol_type = genomic DNA
gagaccacgggaatggaagt

SEQ ID NO: 186 - DNA, 20 bp, Homo sapiens
  source 1..20: mol_type = genomic DNA
ggagaccacgggaatggaag

SEQ ID NO: 187 - DNA, 20 bp, Homo sapiens
  source 1..20: mol_type = genomic DNA
gtgcaaggagaccacgggaa

SEQ ID NO: 188 - DNA, 20 bp, Homo sapiens
  source 1..20: mol_type = genomic DNA
agaaagtgcaaggagaccac

SEQ ID NO: 189 - DNA, 20 bp, Homo sapiens
  source 1..20: mol_type = genomic DNA
gagaaagtgcaaggagacca

SEQ ID NO: 190 - DNA, 20 bp, Homo sapiens
  source 1..20: mol_type = genomic DNA
ctctgaactgagaaagtgca

SEQ ID NO: 191 - DNA, 20 bp, Homo sapiens
  source 1..20: mol_type = genomic DNA
agttgtacactgtgtacatt

SEQ ID NO: 192 - DNA, 20 bp, Homo sapiens
  source 1..20: mol_type = genomic DNA
tgttttctgtcgtgtgtgtt

SEQ ID NO: 193 - DNA, 20 bp, Homo sapiens
  source 1..20: mol_type = genomic DNA
ttctgtcgtgtgtgttggga

SEQ ID NO: 194 - DNA, 20 bp, Homo sapiens
  source 1..20: mol_type = genomic DNA
tctgtcgtgtgtgttgggat

SEQ ID NO: 195 - DNA, 20 bp, Homo sapiens
  source 1..20: mol_type = genomic DNA
gtgtgttgggatgggatccc

SEQ ID NO: 196 - DNA, 20 bp, Homo sapiens
  source 1..20: mol_type = genomic DNA
acacgggctttccctggcct

SEQ ID NO: 197 - DNA, 20 bp, Homo sapiens
  source 1..20: mol_type = genomic DNA
gacacgggctttccctggcc

SEQ ID NO: 198 - DNA, 20 bp, Homo sapiens
  source 1..20: mol_type = genomic DNA
tcattgacacgggctttccc

SEQ ID NO: 199 - DNA, 20 bp, Homo sapiens
  source 1..20: mol_type = genomic DNA
aagcccgtgtcaatgaatgc

SEQ ID NO: 200 - DNA, 20 bp, Homo sapiens
  source 1..20: mol_type = genomic DNA
agcccgtgtcaatgaatgcc

SEQ ID NO: 201 - DNA, 20 bp, Homo sapiens
  source 1..20: mol_type = genomic DNA
gcccgtgtcaatgaatgccg

SEQ ID NO: 202 - DNA, 20 bp, Homo sapiens
  source 1..20: mol_type = genomic DNA
tccccggcattcattgacac

SEQ ID NO: 203 - DNA, 20 bp, Homo sapiens
  source 1..20: mol_type = genomic DNA
gtccccggcattcattgaca

SEQ ID NO: 204 - DNA, 20 bp, Homo sapiens
  source 1..20: mol_type = genomic DNA
aatgaatgccggggacagag

SEQ ID NO: 205 - DNA, 20 bp, Homo sapiens
  source 1..20: mol_type = genomic DNA
atgaatgccggggacagaga

SEQ ID NO: 206 - DNA, 20 bp, Homo sapiens
  source 1..20: mol_type = genomic DNA
tgccggggacagagaggggc

SEQ ID NO: 207 - DNA, 20 bp, Homo sapiens
  source 1..20: mol_type = genomic DNA
aacctgcccctctctgtccc

SEQ ID NO: 208 - DNA, 20 bp, Homo sapiens
  source 1..20: mol_type = genomic DNA
acagagaggggcaggttgac

SEQ ID NO: 209 - DNA, 20 bp, Homo sapiens
  source 1..20: mol_type = genomic DNA
cagagaggggcaggttgacc

SEQ ID NO: 210 - DNA, 20 bp, Homo sapiens
  source 1..20: mol_type = genomic DNA
cgatcacggctttgaagtcc

SEQ ID NO: 211 - DNA, 20 bp, Homo sapiens
  source 1..20: mol_type = genomic DNA
gttctcgatattcacgatca

SEQ ID NO: 212 - DNA, 20 bp, Homo sapiens
  source 1..20: mol_type = genomic DNA
ggcggacataaagacgacaa

SEQ ID NO: 213 - DNA, 20 bp, Homo sapiens
  source 1..20: mol_type = genomic DNA
aagtggaagcactaggtggg

SEQ ID NO: 214 - DNA, 20 bp, Homo sapiens
  source 1..20: mol_type = genomic DNA
tagaagtggaagcactaggt

SEQ ID NO: 215 - DNA, 20 bp, Homo sapiens
  source 1..20: mol_type = genomic DNA
atagaagtggaagcactagg

SEQ ID NO: 216 - DNA, 20 bp, Homo sapiens
  source 1..20: mol_type = genomic DNA
tgcatagaagtggaagcact

SEQ ID NO: 217 - DNA, 20 bp, Homo sapiens
  source 1..20: mol_type = genomic DNA
tggaggcatttgcatagaag

SEQ ID NO: 218 - DNA, 20 bp, Homo sapiens
  source 1..20: mol_type = genomic DNA
tggggaagtgaatggcttgg

SEQ ID NO: 219 - DNA, 20 bp, Homo sapiens
  source 1..20: mol_type = genomic DNA
gattggggaagtgaatggct

SEQ ID NO: 220 - DNA, 20 bp, Homo sapiens
  source 1..20: mol_type = genomic DNA
gacaagattggggaagtgaa

SEQ ID NO: 221 - DNA, 20 bp, Homo sapiens
  source 1..20: mol_type = genomic DNA
ttccccaatcttgtcgttga

SEQ ID NO: 222 - DNA, 20 bp, Homo sapiens
  source 1..20: mol_type = genomic DNA
tccccaatcttgtcgttgat

SEQ ID NO: 223 - DNA, 20 bp, Homo sapiens
  source 1..20: mol_type = genomic DNA
acccatcaacgacaagattg

SEQ ID NO: 224 - DNA, 20 bp, Homo sapiens
  source 1..20: mol_type = genomic DNA
tacccatcaacgacaagatt

SEQ ID NO: 225 - DNA, 20 bp, Homo sapiens
  source 1..20: mol_type = genomic DNA
gtatgtgtttaaaacatgca

SEQ ID NO: 226 - DNA, 20 bp, Homo sapiens
  source 1..20: mol_type = genomic DNA
tgtttaaaacatgcacggtg

SEQ ID NO: 227 - DNA, 20 bp, Homo sapiens
  source 1..20: mol_type = genomic DNA
taaaacatgcacggtgaggc

SEQ ID NO: 228 - DNA, 20 bp, Homo sapiens
  source 1..20: mol_type = genomic DNA
aaaacatgcacggtgaggcc

SEQ ID NO: 229 - DNA, 20 bp, Homo sapiens
  source 1..20: mol_type = genomic DNA
ggctgctgatgcaccatgca

SEQ ID NO: 230 - DNA, 20 bp, Homo sapiens
  source 1..20: mol_type = genomic DNA
catggtgcatcagcagccca

SEQ ID NO: 231 - DNA, 20 bp, Homo sapiens
  source 1..20: mol_type = genomic DNA
catcagcagcccatggcctc

SEQ ID NO: 232 - DNA, 20 bp, Homo sapiens
  source 1..20: mol_type = genomic DNA
catgcctggccagaggccat

SEQ ID NO: 233 - DNA, 20 bp, Homo sapiens
  source 1..20: mol_type = genomic DNA
gcctctggccaggcatggcg

SEQ ID NO: 234 - DNA, 20 bp, Homo sapiens
  source 1..20: mol_type = genomic DNA
gcctcgccatgcctggccag

SEQ ID NO: 235 - DNA, 20 bp, Homo sapiens
  source 1..20: mol_type = genomic DNA
catctcttaaaaaatgaatt

SEQ ID NO: 236 - DNA, 20 bp, Homo sapiens
  source 1..20: mol_type = genomic DNA
aaatgaatttggccagacac

SEQ ID NO: 237 - DNA, 20 bp, Homo sapiens
  source 1..20: mol_type = genomic DNA
tatagttgtatttctgaaat

SEQ ID NO: 238 - DNA, 20 bp, Homo sapiens
  source 1..20: mol_type = genomic DNA
ctccagtctggatcgtttga

SEQ ID NO: 239 - DNA, 20 bp, Homo sapiens
  source 1..20: mol_type = genomic DNA
tccagtctggatcgtttgac

SEQ ID NO: 240 - DNA, 20 bp, Homo sapiens
  source 1..20: mol_type = genomic DNA
cgtcaaacgatccagactgg

SEQ ID NO: 241 - DNA, 20 bp, Homo sapiens
  source 1..20: mol_type = genomic DNA
tcccgtcaaacgatccagac

SEQ ID NO: 242 - DNA, 20 bp, Homo sapiens
  source 1..20: mol_type = genomic DNA
ggatcgtttgacgggacttc

SEQ ID NO: 243 - DNA, 20 bp, Homo sapiens
  source 1..20: mol_type = genomic DNA
acatcagtgcaacagtaaca

SEQ ID NO: 244 - DNA, 20 bp, Homo sapiens
  source 1..20: mol_type = genomic DNA
ggaggctgtcactgtctctc

SEQ ID NO: 245 - DNA, 20 bp, Homo sapiens
  source 1..20: mol_type = genomic DNA
ttcacgcgggagtctgacgg

SEQ ID NO: 246 - DNA, 20 bp, Homo sapiens
  source 1..20: mol_type = genomic DNA
atcttcacgcgggagtctga

SEQ ID NO: 247 - DNA, 20 bp, Homo sapiens
  source 1..20: mol_type = genomic DNA
tcccgcgtgaagatgtcaca

SEQ ID NO: 248 - DNA, 20 bp, Homo sapiens
  source 1..20: mol_type = genomic DNA
cccgcgtgaagatgtcacaa

SEQ ID NO: 249 - DNA, 20 bp, Homo sapiens
  source 1..20: mol_type = genomic DNA
cccttgtgacatcttcacgc

SEQ ID NO: 250 - DNA, 20 bp, Homo sapiens
  source 1..20: mol_type = genomic DNA
tcccttgtgacatcttcacg

SEQ ID NO: 251 - DNA, 20 bp, Homo sapiens
  source 1..20: mol_type = genomic DNA
gtgaagatgtcacaagggat

SEQ ID NO: 252 - DNA, 20 bp, Homo sapiens
  source 1..20: mol_type = genomic DNA
agggattggcaattgtcccc

SEQ ID NO: 253 - DNA, 20 bp, Homo sapiens
  source 1..20: mol_type = genomic DNA
gggattggcaattgtcccca

SEQ ID NO: 254 - DNA, 20 bp, Homo sapiens
  source 1..20: mol_type = genomic DNA
gacacagtgttttgtccctg

SEQ ID NO: 255 - DNA, 20 bp, Homo sapiens
  source 1..20: mol_type = genomic DNA
ggacacagtgttttgtccct

SEQ ID NO: 256 - DNA, 20 bp, Homo sapiens
  source 1..20: mol_type = genomic DNA
gggacacagtgttttgtccc

SEQ ID NO: 257 - DNA, 20 bp, Homo sapiens
  source 1..20: mol_type = genomic DNA
cactgtgtcccccccagtgc

SEQ ID NO: 258 - DNA, 20 bp, Homo sapiens
  source 1..20: mol_type = genomic DNA
actgtgtcccccccagtgca

SEQ ID NO: 259 - DNA, 20 bp, Homo sapiens
  source 1..20: mol_type = genomic DNA
cacggttccctgcactgggg

SEQ ID NO: 260 - DNA, 20 bp, Homo sapiens
  source 1..20: mol_type = genomic DNA
tcacggttccctgcactggg

SEQ ID NO: 261 - DNA, 20 bp, Homo sapiens
  source 1..20: mol_type = genomic DNA
atcacggttccctgcactgg

SEQ ID NO: 262 - DNA, 20 bp, Homo sapiens
  source 1..20: mol_type = genomic DNA
tatcacggttccctgcactg

SEQ ID NO: 263 - DNA, 20 bp, Homo sapiens
  source 1..20: mol_type = genomic DNA
ttatcacggttccctgcact

SEQ ID NO: 264 - DNA, 20 bp, Homo sapiens
  source 1..20: mol_type = genomic DNA
cttatcacggttccctgcac

SEQ ID NO: 265 - DNA, 20 bp, Homo sapiens
  source 1..20: mol_type = genomic DNA
ggaaccgtgataagcctttc

SEQ ID NO: 266 - DNA, 20 bp, Homo sapiens
  source 1..20: mol_type = genomic DNA
gtgataagcctttctggttt

SEQ ID NO: 267 - DNA, 20 bp, Homo sapiens
  source 1..20: mol_type = genomic DNA
gaaaccagaaaggcttatca

SEQ ID NO: 268 - DNA, 20 bp, Homo sapiens
  source 1..20: mol_type = genomic DNA
tacgtgctccgaaaccagaa

SEQ ID NO: 269 - DNA, 20 bp, Homo sapiens
  source 1..20: mol_type = genomic DNA
atgcgtccctgtacagatag

SEQ ID NO: 270 - DNA, 20 bp, Homo sapiens
  source 1..20: mol_type = genomic DNA
tgcgtccctgtacagatagt

SEQ ID NO: 271 - DNA, 20 bp, Homo sapiens
  source 1..20: mol_type = genomic DNA
gcgtccctgtacagatagtg

SEQ ID NO: 272 - DNA, 20 bp, Homo sapiens
  source 1..20: mol_type = genomic DNA
aaatccccactatctgtaca

SEQ ID NO: 273 - DNA, 20 bp, Homo sapiens
  source 1..20: mol_type = genomic DNA
aaaatccccactatctgtac

SEQ ID NO: 274 - DNA, 20 bp, Homo sapiens
  source 1..20: mol_type = genomic DNA
tatgtttgcactttgtatat

SEQ ID NO: 275 - DNA, 20 bp, Homo sapiens
  source 1..20: mol_type = genomic DNA
ctatttatttttgcaaaccc

SEQ ID NO: 276 - DNA, 20 bp, Homo sapiens
  source 1..20: mol_type = genomic DNA
ctgaacaaatacagcaacca

SEQ ID NO: 277 - DNA, 20 bp, Homo sapiens
  source 1..20: mol_type = genomic DNA
actgaacaaatacagcaacc

SEQ ID NO: 278 - DNA, 20 bp, Homo sapiens
  source 1..20: mol_type = genomic DNA
atttgttcagtgactattct

SEQ ID NO: 279 - DNA, 20 bp, Homo sapiens
  source 1..20: mol_type = genomic DNA
tttgttcagtgactattctc

SEQ ID NO: 280 - DNA, 20 bp, Homo sapiens
  source 1..20: mol_type = genomic DNA
ttgttcagtgactattctcg

SEQ ID NO: 281 - DNA, 20 bp, Homo sapiens
  source 1..20: mol_type = genomic DNA
ctattctcggggccctgtgt

SEQ ID NO: 282 - DNA, 20 bp, Homo sapiens
  source 1..20: mol_type = genomic DNA
tattctcggggccctgtgta

SEQ ID NO: 283 - DNA, 20 bp, Homo sapiens
  source 1..20: mol_type = genomic DNA
attctcggggccctgtgtag

SEQ ID NO: 284 - DNA, 20 bp, Homo sapiens
  source 1..20: mol_type = genomic DNA
ttctcggggccctgtgtagg

SEQ ID NO: 285 - DNA, 20 bp, Homo sapiens
  source 1..20: mol_type = genomic DNA
aggcaataaccccctacaca

SEQ ID NO: 286 - DNA, 20 bp, Homo sapiens
  source 1..20: mol_type = genomic DNA
gaggcaataaccccctacac

SEQ ID NO: 287 - DNA, 20 bp, Homo sapiens
  source 1..20: mol_type = genomic DNA
ataaagaagaggcatttcag

SEQ ID NO: 288 - DNA, 20 bp, Homo sapiens
  source 1..20: mol_type = genomic DNA
aatctttgtacataaagaag

SEQ ID NO: 289 - DNA, 20 bp, Homo sapiens
  source 1..20: mol_type = genomic DNA
caaagattatttgcacgaac

SEQ ID NO: 290 - DNA, 20 bp, Homo sapiens
  source 1..20: mol_type = genomic DNA
ggactgtgtgcaacgctttt

SEQ ID NO: 291 - DNA, 20 bp, Homo sapiens
  source 1..20: mol_type = genomic DNA
gactgtgtgcaacgcttttt

SEQ ID NO: 292 - DNA, 20 bp, Homo sapiens
  source 1..20: mol_type = genomic DNA
gtccccgttgtatgtatgag

SEQ ID NO: 293 - DNA, 20 bp, Homo sapiens
  source 1..20: mol_type = genomic DNA
agccactcatacatacaacg

SEQ ID NO: 294 - DNA, 20 bp, Homo sapiens
  source 1..20: mol_type = genomic DNA
aagccactcatacatacaac

SEQ ID NO: 295 - DNA, 20 bp, Homo sapiens
  source 1..20: mol_type = genomic DNA
gaagccactcatacatacaa

SEQ ID NO: 296 - DNA, 20 bp, Homo sapiens
  source 1..20: mol_type = genomic DNA
ttgtatgtatgagtggcttc

SEQ ID NO: 297 - DNA, 20 bp, Homo sapiens
  source 1..20: mol_type = genomic DNA
tgtatgtatgagtggcttct

SEQ ID NO: 298 - DNA, 20 bp, Homo sapiens
  source 1..20: mol_type = genomic DNA
tatgagtggcttctgggaga

SEQ ID NO: 299 - DNA, 20 bp, Homo sapiens
  source 1..20: mol_type = genomic DNA
atgagtggcttctgggagat

SEQ ID NO: 300 - DNA, 20 bp, Homo sapiens
  source 1..20: mol_type = genomic DNA
tacaaaaaccttctatacag

SEQ ID NO: 301 - DNA, 20 bp, Homo sapiens
  source 1..20: mol_type = genomic DNA
ttgatcacagtaagacattc

SEQ ID NO: 302 - DNA, 20 bp, Homo sapiens
  source 1..20: mol_type = genomic DNA
tgcatcgagtttagacaaat

SEQ ID NO: 303 - DNA, 20 bp, Homo sapiens
  source 1..20: mol_type = genomic DNA
ttagcgttggccacccgcgg

SEQ ID NO: 304 - DNA, 20 bp, Homo sapiens
  source 1..20: mol_type = genomic DNA
aaattagcgttggccacccg

SEQ ID NO: 305 - RNA, 20 nt, synthetic construct
  misc_feature 1..20: note = Synthetic
  source 1..20: mol_type = other RNA
acgtggcgtgaacatctgcc

SEQ ID NO: 306 - RNA, 20 nt, synthetic construct
  misc_feature 1..20: note = Synthetic
  source 1..20: mol_type = other RNA
ctgggcagggacgggactcc

SEQ ID NO: 307 - RNA, 20 nt, synthetic construct
  misc_feature 1..20: note = Synthetic
  source 1..20: mol_type = other RNA
gaggtctcaggaagggttct

SEQ ID NO: 308 - RNA, 20 nt, synthetic construct
  misc_feature 1..20: note = Synthetic
  source 1..20: mol_type = other RNA
cgaggtctcaggaagggttc

SEQ ID NO: 309 - RNA, 20 nt, synthetic construct
  misc_feature 1..20: note = Synthetic
  source 1..20: mol_type = other RNA
aacccttcctgagacctcgc

SEQ ID NO: 310 - RNA, 20 nt, synthetic construct
  misc_feature 1..20: note = Synthetic
  source 1..20: mol_type = other RNA
ggccggcgaggtctcaggaa

SEQ ID NO: 311 - RNA, 20 nt, synthetic construct
  misc_feature 1..20: note = Synthetic
  source 1..20: mol_type = other RNA
aggccggcgaggtctcagga

SEQ ID NO: 312 - RNA, 20 nt, synthetic construct
  misc_feature 1..20: note = Synthetic
  source 1..20: mol_type = other RNA
aacaaggccggcgaggtctc

SEQ ID NO: 313 - RNA, 20 nt, synthetic construct
  misc_feature 1..20: note = Synthetic
  source 1..20: mol_type = other RNA
tgaataaaacaaggccggcg

SEQ ID NO: 314 - RNA, 20 nt, synthetic construct
  misc_feature 1..20: note = Synthetic
  source 1..20: mol_type = other RNA
gtctttgaataaaacaaggc

SEQ ID NO: 315 - RNA, 20 nt, synthetic construct
  misc_feature 1..20: note = Synthetic
  source 1..20: mol_type = other RNA
ctctgtctttgaataaaaca

SEQ ID NO: 316 - RNA, 20 nt, synthetic construct
  misc_feature 1..20: note = Synthetic
  source 1..20: mol_type = other RNA
agctctggcaggcaatgctt

SEQ ID NO: 317 - RNA, 20 nt, synthetic construct
  misc_feature 1..20: note = Synthetic
  source 1..20: mol_type = other RNA
atataaaacaaagctctggc

SEQ ID NO: 318 - RNA, 20 nt, synthetic construct
  misc_feature 1..20: note = Synthetic
  source 1..20: mol_type = other RNA
aaatatataaaacaaagctc

SEQ ID NO: 319 - RNA, 20 nt, synthetic construct
  misc_feature 1..20: note = Synthetic
  source 1..20: mol_type = other RNA
attcatctgggaggcagaac

SEQ ID NO: 320 - RNA, 20 nt, synthetic construct
  misc_feature 1..20: note = Synthetic
  source 1..20: mol_type = other RNA
ctgggaggcagaacaggctt

SEQ ID NO: 321 - RNA, 20 nt, synthetic construct
  misc_feature 1..20: note = Synthetic
  source 1..20: mol_type = other RNA
ttcggacagtgcccatgcaa

SEQ ID NO: 322 - RNA, 20 nt, synthetic construct
  misc_feature 1..20: note = Synthetic
  source 1..20: mol_type = other RNA
acagtgcccatgcaatggct

SEQ ID NO: 323 - RNA, 20 nt, synthetic construct
  misc_feature 1..20: note = Synthetic
  source 1..20: mol_type = other RNA
cagtgcccatgcaatggctt

SEQ ID NO: 324 - RNA, 20 nt, synthetic construct
  misc_feature 1..20: note = Synthetic
  source 1..20: mol_type = other RNA
gcccatgcaatggcttgggt

SEQ ID NO: 325 - RNA, 20 nt, synthetic construct
  misc_feature 1..20: note = Synthetic
  source 1..20: mol_type = other RNA
cccatgcaatggcttgggtt

SEQ ID NO: 326 - RNA, 20 nt, synthetic construct
  misc_feature 1..20: note = Synthetic
  source 1..20: mol_type = other RNA
cccaacccaagccattgcat

SEQ ID NO: 327 - RNA, 20 nt, synthetic construct
  misc_feature 1..20: note = Synthetic
  source 1..20: mol_type = other RNA
tcccaacccaagccattgca

SEQ ID NO: 328 - RNA, 20 nt, synthetic construct
  misc_feature 1..20: note = Synthetic
  source 1..20: mol_type = other RNA
gtttcttcctttcctcgtga

SEQ ID NO: 329 - RNA, 20 nt, synthetic construct
  misc_feature 1..20: note = Synthetic
  source 1..20: mol_type = other RNA
ctcttatccttcacgaggaa

SEQ ID NO: 330 - RNA, 20 nt, synthetic construct
  misc_feature 1..20: note = Synthetic
  source 1..20: mol_type = other RNA
tgtttctcttatccttcacg

SEQ ID NO: 331 - RNA, 20 nt, synthetic construct
  misc_feature 1..20: note = Synthetic
  source 1..20: mol_type = other RNA
aggataagagaaacaggccc

SEQ ID NO: 332 - RNA, 20 nt, synthetic construct
  misc_feature 1..20: note = Synthetic
  source 1..20: mol_type = other RNA
ggataagagaaacaggcccg

SEQ ID NO: 333 - RNA, 20 nt, synthetic construct
  misc_feature 1..20: note = Synthetic
  source 1..20: mol_type = other RNA
gataagagaaacaggcccgg

SEQ ID NO: 334 - RNA, 20 nt, synthetic construct
  misc_feature 1..20: note = Synthetic
  source 1..20: mol_type = other RNA
ataagagaaacaggcccggg

SEQ ID NO: 335 - RNA, 20 nt, synthetic construct
  misc_feature 1..20: note = Synthetic
  source 1..20: mol_type = other RNA
gaaacaggcccggggggacc

SEQ ID NO: 336 - RNA, 20 nt, synthetic construct
  misc_feature 1..20: note = Synthetic
  source 1..20: mol_type = other RNA
ggtgtcatcctggtcccccc

SEQ ID NO: 337 - RNA, 20 nt, synthetic construct
  misc_feature 1..20: note = Synthetic
  source 1..20: mol_type = other RNA
aggtgtcatcctggtccccc

SEQ ID NO: 338 - RNA, 20 nt, synthetic construct
  misc_feature 1..20: note = Synthetic
  source 1..20: mol_type = other RNA
gagaaatggaggtgtcatcc

SEQ ID NO: 339 - RNA, 20 nt, synthetic construct
  misc_feature 1..20: note = Synthetic
  source 1..20: mol_type = other RNA
tgacacctccatttctctcc

SEQ ID NO: 340 - RNA, 20 nt, synthetic construct
  misc_feature 1..20: note = Synthetic
  source 1..20: mol_type = other RNA
aacttcctggagagaaatgg

SEQ ID NO: 341 - RNA, 20 nt, synthetic construct
  misc_feature 1..20: note = Synthetic
  source 1..20: mol_type = other RNA
caaaacttcctggagagaaa

SEQ ID NO: 342 - RNA, 20 nt, synthetic construct
  misc_feature 1..20: note = Synthetic
  source 1..20: mol_type = other RNA
gagagaaactcaaaacttcc

SEQ ID NO: 343 - RNA, 20 nt, synthetic construct
  misc_feature 1..20: note = Synthetic
  source 1..20: mol_type = other RNA
gtttgaggattgtgtcacgg

SEQ ID NO: 344 - RNA, 20 nt, synthetic construct
  misc_feature 1..20: note = Synthetic
  source 1..20: mol_type = other RNA
cgtgacacaatcctcaaaca

SEQ ID NO: 345 - RNA, 20 nt, synthetic construct
  misc_feature 1..20: note = Synthetic
  source 1..20: mol_type = other RNA
catgtttgaggattgtgtca

SEQ ID NO: 346 - RNA, 20 nt, synthetic construct
  misc_feature 1..20: note = Synthetic
  source 1..20: mol_type = other RNA
cctcaaacatggaagatgaa

SEQ ID NO: 347 - RNA, 20 nt, synthetic construct
  misc_feature 1..20: note = Synthetic
  source 1..20: mol_type = other RNA
ctcaaacatggaagatgaaa

SEQ ID NO: 348 - RNA, 20 nt, synthetic construct
  misc_feature 1..20: note = Synthetic
  source 1..20: mol_type = other RNA
tcaaacatggaagatgaaag

SEQ ID NO: 349 - RNA, 20 nt, synthetic construct
  misc_feature 1..20: note = Synthetic
  source 1..20: mol_type = other RNA
cctttcatcttccatgtttg

SEQ ID NO: 350 - RNA, 20 nt, synthetic construct
  misc_feature 1..20: note = Synthetic
  source 1..20: mol_type = other RNA
gtcaggcccagagaagcaag

SEQ ID NO: 351 - RNA, 20 nt, synthetic construct
  misc_feature 1..20: note = Synthetic
  source 1..20: mol_type = other RNA
tgaaagccacttgcttctct

SEQ ID NO: 352 - RNA, 20 nt, synthetic construct
  misc_feature 1..20: note = Synthetic
  source 1..20: mol_type = other RNA
ttgaaagccacttgcttctc

SEQ ID NO: 353 - RNA, 20 nt, synthetic construct
  misc_feature 1..20: note = Synthetic
  source 1..20: mol_type = other RNA
tttcaacacacaacagcaga

SEQ ID NO: 354 - RNA, 20 nt, synthetic construct
  misc_feature 1..20: note = Synthetic
  source 1..20: mol_type = other RNA
acaacagcagatggcaccaa

SEQ ID NO: 355 - RNA, 20 nt, synthetic construct
  misc_feature 1..20: note = Synthetic
  source 1..20: mol_type = other RNA
caacagcagatggcaccaac

SEQ ID NO: 356 - RNA, 20 nt, synthetic construct
  misc_feature 1..20: note = Synthetic
  source 1..20: mol_type = other RNA
atggcaccaacgggaccccc

SEQ ID NO: 357 - RNA, 20 nt, synthetic construct
  misc_feature 1..20: note = Synthetic
  source 1..20: mol_type = other RNA
gcagggccagggggtcccgt

SEQ ID NO: 358 - RNA, 20 nt, synthetic construct
  misc_feature 1..20: note = Synthetic
  source 1..20: mol_type = other RNA
gtggatgaggcagggccagg

SEQ ID NO: 359 - RNA, 20 nt, synthetic construct
  misc_feature 1..20: note = Synthetic
  source 1..20: mol_type = other RNA
agagattggtggatgaggca

SEQ ID NO: 360 - RNA, 20 nt, synthetic construct
  misc_feature 1..20: note = Synthetic
  source 1..20: mol_type = other RNA
ggcttagagattggtggatg

SEQ ID NO: 361 - RNA, 20 nt, synthetic construct
  misc_feature 1..20: note = Synthetic
  source 1..20: mol_type = other RNA
gggtttggcttagagattgg

SEQ ID NO: 362 - RNA, 20 nt, synthetic construct
  misc_feature 1..20: note = Synthetic
  source 1..20: mol_type = other RNA
taggggtttggcttagagat

SEQ ID NO: 363 - RNA, 20 nt, synthetic construct
  misc_feature 1..20: note = Synthetic
  source 1..20: mol_type = other RNA
taagccaaacccctaaactc

SEQ ID NO: 364 - RNA, 20 nt, synthetic construct
  misc_feature 1..20: note = Synthetic
  source 1..20: mol_type = other RNA
gactcctgagtttaggggtt

SEQ ID NO: 365 - RNA, 20 nt, synthetic construct
  misc_feature 1..20: note = Synthetic
  source 1..20: mol_type = other RNA
acgttgactcctgagtttag

SEQ ID NO: 366 - RNA, 20 nt, synthetic construct
  misc_feature 1..20: note = Synthetic
  source 1..20: mol_type = other RNA
cacgttgactcctgagttta

SEQ ID NO: 367 - RNA, 20 nt, synthetic construct
  misc_feature 1..20: note = Synthetic
  source 1..20: mol_type = other RNA
acacgttgactcctgagttt

SEQ ID NO: 368 - RNA, 20 nt, synthetic construct
  misc_feature 1..20: note = Synthetic
  source 1..20: mol_type = other RNA
gcaagccttgctagacagcc

SEQ ID NO: 369 - RNA, 20 nt, synthetic construct
  misc_feature 1..20: note = Synthetic
  source 1..20: mol_type = other RNA
gctaacctggctgtctagca

SEQ ID NO: 370 - RNA, 20 nt, synthetic construct
  misc_feature 1..20: note = Synthetic
  source 1..20: mol_type = other RNA
tgacagggcaaaggctaacc

SEQ ID NO: 371 - RNA, 20 nt, synthetic construct
  misc_feature 1..20: note = Synthetic
  source 1..20: mol_type = other RNA
attcgggggtgacagggcaa

SEQ ID NO: 372 - RNA, 20 nt, synthetic construct
  misc_feature 1..20: note = Synthetic
  source 1..20: mol_type = other RNA
gtcatgattcgggggtgaca

SEQ ID NO: 373 - RNA, 20 nt, synthetic construct
  misc_feature 1..20: note = Synthetic
  source 1..20: mol_type = other RNA
ggtcatgattcgggggtgac

SEQ ID NO: 374 - RNA, 20 nt, synthetic construct
  misc_feature 1..20: note = Synthetic
  source 1..20: mol_type = other RNA
ctgggtgggtcatgattcgg

SEQ ID NO: 375 - RNA, 20 nt, synthetic construct
  misc_feature 1..20: note = Synthetic
  source 1..20: mol_type = other RNA
actgggtgggtcatgattcg

SEQ ID NO: 376 - RNA, 20 nt, synthetic construct
  misc_feature 1..20: note = Synthetic
  source 1..20: mol_type = other RNA
cactgggtgggtcatgattc

SEQ ID NO: 377 - RNA, 20 nt, synthetic construct
  misc_feature 1..20: note = Synthetic
  source 1..20: mol_type = other RNA
acactgggtgggtcatgatt

SEQ ID NO: 378 - RNA, 20 nt, synthetic construct
  misc_feature 1..20: note = Synthetic
  source 1..20: mol_type = other RNA
gacccacccagtgtctttcg

SEQ ID NO: 379 - RNA, 20 nt, synthetic construct
  misc_feature 1..20: note = Synthetic
  source 1..20: mol_type = other RNA
ccacccagtgtctttcgagg

SEQ ID NO: 380 - RNA, 20 nt, synthetic construct
  misc_feature 1..20: note = Synthetic
  source 1..20: mol_type = other RNA
cacccagtgtctttcgaggt

SEQ ID NO: 381 - RNA, 20 nt, synthetic construct
  misc_feature 1..20: note = Synthetic
  source 1..20: mol_type = other RNA
cacctcgaaagacactgggt

SEQ ID NO: 382 - RNA, 20 nt, synthetic construct
  misc_feature 1..20: note = Synthetic
  source 1..20: mol_type = other RNA
aacccacctcgaaagacact

SEQ ID NO: 383 - RNA, 20 nt, synthetic construct
  misc_feature 1..20: note = Synthetic
  source 1..20: mol_type = other RNA
aaacccacctcgaaagacac

SEQ ID NO: 384 - RNA, 20 nt, synthetic construct
  misc_feature 1..20: note = Synthetic
  source 1..20: mol_type = other RNA
gtttgtaccttccttaagcc

SEQ ID NO: 385 - RNA, 20 nt, synthetic construct
  misc_feature 1..20: note = Synthetic
  source 1..20: mol_type = other RNA
taccttccttaagccaggaa

SEQ ID NO: 386 - RNA, 20 nt, synthetic construct
  misc_feature 1..20: note = Synthetic
  source 1..20: mol_type = other RNA
accttccttaagccaggaaa

SEQ ID NO: 387 - RNA, 20 nt, synthetic construct
  misc_feature 1..20: note = Synthetic
  source 1..20: mol_type = other RNA
tccctttcctggcttaagga

SEQ ID NO: 388 - RNA, 20 nt, synthetic construct
  misc_feature 1..20: note = Synthetic
  source 1..20: mol_type = other RNA
tgaatccctttcctggctta

SEQ ID NO: 389 - RNA, 20 nt, synthetic construct
  misc_feature 1..20: note = Synthetic
  source 1..20: mol_type = other RNA
taagccaggaaagggattca

SEQ ID NO: 390 - RNA, 20 nt, synthetic construct
  misc_feature 1..20: note = Synthetic
  source 1..20: mol_type = other RNA
aggaaagggattcatggcgt

SEQ ID NO: 391 - RNA, 20 nt, synthetic construct
  misc_feature 1..20: note = Synthetic
  source 1..20: mol_type = other RNA
gacgccatgaatccctttcc

SEQ ID NO: 392 - RNA, 20 nt, synthetic construct
  misc_feature 1..20: note = Synthetic
  source 1..20: mol_type = other RNA
tcatggcgtcggaaatgatc

SEQ ID NO: 393 - RNA, 20 nt, synthetic construct
  misc_feature 1..20: note = Synthetic
  source 1..20: mol_type = other RNA
aaatgatctggctgaatccg

SEQ ID NO: 394 - RNA, 20 nt, synthetic construct
  misc_feature 1..20: note = Synthetic
  source 1..20: mol_type = other RNA
tgatctggctgaatccgtgg

SEQ ID NO: 395 - RNA, 20 nt, synthetic construct
  misc_feature 1..20: note = Synthetic
  source 1..20: mol_type = other RNA
gtttggtctcggtgccacca

SEQ ID NO: 396 - RNA, 20 nt, synthetic construct
  misc_feature 1..20: note = Synthetic
  source 1..20: mol_type = other RNA
ttggtgaatgagtttggtct

SEQ ID NO: 397 - RNA, 20 nt, synthetic construct
  misc_feature 1..20: note = Synthetic
  source 1..20: mol_type = other RNA
catcatttggtgaatgagtt

SEQ ID NO: 398 - RNA, 20 nt, synthetic construct
  misc_feature 1..20: note = Synthetic
  source 1..20: mol_type = other RNA
caaatgatgccacttcccag

SEQ ID NO: 399 - RNA, 20 nt, synthetic construct
  misc_feature 1..20: note = Synthetic
  source 1..20: mol_type = other RNA
ctctgggaagtggcatcatt

SEQ ID NO: 400 - RNA, 20 nt, synthetic construct
  misc_feature 1..20: note = Synthetic
  source 1..20: mol_type = other RNA
caggctctgcctctgggaag

SEQ ID NO: 401 - RNA, 20 nt, synthetic construct
  misc_feature 1..20: note = Synthetic
  source 1..20: mol_type = other RNA
agaggcagagcctgagtcac

SEQ ID NO: 402 - RNA, 20 nt, synthetic construct
  misc_feature 1..20: note = Synthetic
  source 1..20: mol_type = other RNA
agtgactcaggctctgcctc

SEQ ID NO: 403 - RNA, 20 nt, synthetic construct
  misc_feature 1..20: note = Synthetic
  source 1..20: mol_type = other RNA
ttaagggtgaccagtgactc

SEQ ID NO: 404 - RNA, 20 nt, synthetic construct
  misc_feature 1..20: note = Synthetic
  source 1..20: mol_type = other RNA
caggcacttaataaatatta

SEQ ID NO: 405 - RNA, 20 nt, synthetic construct
  misc_feature 1..20: note = Synthetic
  source 1..20: mol_type = other RNA
tattaagtgcctgagacacc

SEQ ID NO: 406 - RNA, 20 nt, synthetic construct
  misc_feature 1..20: note = Synthetic
  source 1..20: mol_type = other RNA
cctgagacacccggttacct

SEQ ID NO: 407 - RNA, 20 nt, synthetic construct
  misc_feature 1..20: note = Synthetic
  source 1..20: mol_type = other RNA
ccaaggtaaccgggtgtctc

SEQ ID NO: 408 - RNA, 20 nt, synthetic construct
  misc_feature 1..20: note = Synthetic
  source 1..20: mol_type = other RNA
acccggttaccttggccgtg

SEQ ID NO: 409 - RNA, 20 nt, synthetic construct
  misc_feature 1..20: note = Synthetic
  source 1..20: mol_type = other RNA
tcctcacggccaaggtaacc

SEQ ID NO: 410 - RNA, 20 nt, synthetic construct
  misc_feature 1..20: note = Synthetic
  source 1..20: mol_type = other RNA
gtcctcacggccaaggtaac

SEQ ID NO: 411 - RNA, 20 nt, synthetic construct
  misc_feature 1..20: note = Synthetic
  source 1..20: mol_type = other RNA
accttggccgtgaggacacg

SEQ ID NO: 412 - RNA, 20 nt, synthetic construct
  misc_feature 1..20: note = Synthetic
  source 1..20: mol_type = other RNA
gccacgtgtcctcacggcca

SEQ ID NO: 413 - RNA, 20 nt, synthetic construct
  misc_feature 1..20: note = Synthetic
  source 1..20: mol_type = other RNA
gtgcaggccacgtgtcctca

SEQ ID NO: 414 - RNA, 20 nt, synthetic construct
  misc_feature 1..20: note = Synthetic
  source 1..20: mol_type = other RNA
aggacacgtggcctgcaccc

SEQ ID NO: 415 - RNA, 20 nt, synthetic construct
  misc_feature 1..20: note = Synthetic
  source 1..20: mol_type = other RNA
acgtggcctgcacccaggtg

SEQ ID NO: 416 - RNA, 20 nt, synthetic construct
  misc_feature 1..20: note = Synthetic
  source 1..20: mol_type = other RNA
tgcacccaggtgtggctgtc

SEQ ID NO: 417 - RNA, 20 nt, synthetic construct
  misc_feature 1..20: note = Synthetic
  source 1..20: mol_type = other RNA
tgacagccacacctgggtgc

SEQ ID NO: 418 - RNA, 20 nt, synthetic construct
  misc_feature 1..20: note = Synthetic
  source 1..20: mol_type = other RNA
gtgtcctgacagccacacct

SEQ ID NO: 419 - RNA, 20 nt, synthetic construct
  misc_feature 1..20: note = Synthetic
  source 1..20: mol_type = other RNA
ggtgtcctgacagccacacc

SEQ ID NO: 420 - RNA, 20 nt, synthetic construct
  misc_feature 1..20: note = Synthetic
  source 1..20: mol_type = other RNA
tggctgtcaggacaccagcc

SEQ ID NO: 421 - RNA, 20 nt, synthetic construct
  misc_feature 1..20: note = Synthetic
  source 1..20: mol_type = other RNA
cgggaggatgggcaccaggc

SEQ ID NO: 422 - RNA, 20 nt, synthetic construct
  misc_feature 1..20: note = Synthetic
  source 1..20: mol_type = other RNA
gggtcgggaggatgggcacc

SEQ ID NO: 423 - RNA, 20 nt, synthetic construct
  misc_feature 1..20: note = Synthetic
  source 1..20: mol_type = other RNA
tgggtaggggtcgggaggat

SEQ ID NO: 424 - RNA, 20 nt, synthetic construct
  misc_feature 1..20: note = Synthetic
  source 1..20: mol_type = other RNA
ggaagtgggtaggggtcggg

SEQ ID NO: 425 - RNA, 20 nt, synthetic construct
  misc_feature 1..20: note = Synthetic
  source 1..20: mol_type = other RNA
cctacccacttccattcccg

SEQ ID NO: 426 - RNA, 20 nt, synthetic construct
  misc_feature 1..20: note = Synthetic
  source 1..20: mol_type = other RNA
acgggaatggaagtgggtag

SEQ ID NO: 427 - RNA, 20 nt, synthetic construct
  misc_feature 1..20: note = Synthetic
  source 1..20: mol_type = other RNA
cacgggaatggaagtgggta

SEQ ID NO: 428 - RNA, 20 nt, synthetic construct
  misc_feature 1..20: note = Synthetic
  source 1..20: mol_type = other RNA
ccacgggaatggaagtgggt

SEQ ID NO: 429 - RNA, 20 nt, synthetic construct
  misc_feature 1..20: note = Synthetic
  source 1..20: mol_type = other RNA
gagaccacgggaatggaagt

SEQ ID NO: 430 - RNA, 20 nt, synthetic construct
  misc_feature 1..20: note = Synthetic
  source 1..20: mol_type = other RNA
ggagaccacgggaatggaag

SEQ ID NO: 431 - RNA, 20 nt, synthetic construct
  misc_feature 1..20: note = Synthetic
  source 1..20: mol_type = other RNA
gtgcaaggagaccacgggaa

SEQ ID NO: 432 - RNA, 20 nt, synthetic construct
  misc_feature 1..20: note = Synthetic
  source 1..20: mol_type = other RNA
agaaagtgcaaggagaccac

SEQ ID NO: 433 - RNA, 20 nt, synthetic construct
  misc_feature 1..20: note = Synthetic
  source 1..20: mol_type = other RNA
gagaaagtgcaaggagacca

SEQ ID NO: 434 - RNA, 20 nt, synthetic construct
  misc_feature 1..20: note = Synthetic
  source 1..20: mol_type = other RNA
ctctgaactgagaaagtgca

SEQ ID NO: 435 - RNA, 20 nt, synthetic construct
  misc_feature 1..20: note = Synthetic
  source 1..20: mol_type = other RNA
agttgtacactgtgtacatt

SEQ ID NO: 436 - RNA, 20 nt, synthetic construct
  misc_feature 1..20: note = Synthetic
  source 1..20: mol_type = other RNA
tgttttctgtcgtgtgtgtt

SEQ ID NO: 437 - RNA, 20 nt, synthetic construct
  misc_feature 1..20: note = Synthetic
  source 1..20: mol_type = other RNA
ttctgtcgtgtgtgttggga

SEQ ID NO: 438 - RNA, 20 nt, synthetic construct
  misc_feature 1..20: note = Synthetic
  source 1..20: mol_type = other RNA
tctgtcgtgtgtgttgggat

SEQ ID NO: 439 - RNA, 20 nt, synthetic construct
  misc_feature 1..20: note = Synthetic
  source 1..20: mol_type = other RNA
gtgtgttgggatgggatccc

SEQ ID NO: 440 - RNA, 20 nt, synthetic construct
  misc_feature 1..20: note = Synthetic
  source 1..20: mol_type = other RNA
acacgggctttccctggcct

SEQ ID NO: 441 - RNA, 20 nt, synthetic construct
  misc_feature 1..20: note = Synthetic
  source 1..20: mol_type = other RNA
gacacgggctttccctggcc

SEQ ID NO: 442 - RNA, 20 nt, synthetic construct
  misc_feature 1..20: note = Synthetic
  source 1..20: mol_type = other RNA
tcattgacacgggctttccc

SEQ ID NO: 443 - RNA, 20 nt, synthetic construct
  misc_feature 1..20: note = Synthetic
  source 1..20: mol_type = other RNA
aagcccgtgtcaatgaatgc

SEQ ID NO: 444 - RNA, 20 nt, synthetic construct
  misc_feature 1..20: note = Synthetic
  source 1..20: mol_type = other RNA
agcccgtgtcaatgaatgcc

SEQ ID NO: 445 - RNA, 20 nt, synthetic construct
  misc_feature 1..20: note = Synthetic
  source 1..20: mol_type = other RNA
gcccgtgtcaatgaatgccg

SEQ ID NO: 446 - RNA, 20 nt, synthetic construct
  misc_feature 1..20: note = Synthetic
  source 1..20: mol_type = other RNA
tccccggcattcattgacac

SEQ ID NO: 447 - RNA, 20 nt, synthetic construct
  misc_feature 1..20: note = Synthetic
  source 1..20: mol_type = other RNA
gtccccggcattcattgaca

SEQ ID NO: 448 - RNA, 20 nt, synthetic construct
  misc_feature 1..20: note = Synthetic
  source 1..20: mol_type = other RNA
aatgaatgccggggacagag

SEQ ID NO: 449 - RNA, 20 nt, synthetic construct
  misc_feature 1..20: note = Synthetic
  source 1..20: mol_type = other RNA
atgaatgccggggacagaga

SEQ ID NO: 450 - RNA, 20 nt, synthetic construct
  misc_feature 1..20: note = Synthetic
  source 1..20: mol_type = other RNA
tgccggggacagagaggggc

SEQ ID NO: 451 - RNA, 20 nt, synthetic construct
  misc_feature 1..20: note = Synthetic
  source 1..20: mol_type = other RNA
aacctgcccctctctgtccc

SEQ ID NO: 452 - RNA, 20 nt, synthetic construct
  misc_feature 1..20: note = Synthetic
  source 1..20: mol_type = other RNA
acagagaggggcaggttgac

SEQ ID NO: 453 - RNA, 20 nt, synthetic construct
  misc_feature 1..20: note = Synthetic
  source 1..20: mol_type = other RNA
cagagaggggcaggttgacc

SEQ ID NO: 454 - RNA, 20 nt, synthetic construct
  misc_feature 1..20: note = Synthetic
  source 1..20: mol_type = other RNA
cgatcacggctttgaagtcc

SEQ ID NO: 455 - RNA, 20 nt, synthetic construct
  misc_feature 1..20: note = Synthetic
  source 1..20: mol_type = other RNA
gttctcgatattcacgatca

SEQ ID NO: 456 - RNA, 20 nt, synthetic construct
  misc_feature 1..20: note = Synthetic
  source 1..20: mol_type = other RNA
ggcggacataaagacgacaa

SEQ ID NO: 457 - RNA, 20 nt, synthetic construct
  misc_feature 1..20: note = Synthetic
  source 1..20: mol_type = other RNA
aagtggaagcactaggtggg

SEQ ID NO: 458 - RNA, 20 nt, synthetic construct
  misc_feature 1..20: note = Synthetic
  source 1..20: mol_type = other RNA
tagaagtggaagcactaggt

SEQ ID NO: 459 - RNA, 20 nt, synthetic construct
  misc_feature 1..20: note = Synthetic
  source 1..20: mol_type = other RNA
atagaagtggaagcactagg

SEQ ID NO: 460 - RNA, 20 nt, synthetic construct
  misc_feature 1..20: note = Synthetic
  source 1..20: mol_type = other RNA
tgcatagaagtggaagcact

SEQ ID NO: 461 - RNA, 20 nt, synthetic construct
  misc_feature 1..20: note = Synthetic
  source 1..20: mol_type = other RNA
tggaggcatttgcatagaag

SEQ ID NO: 462 - RNA, 20 nt, synthetic construct
  misc_feature 1..20: note = Synthetic
  source 1..20: mol_type = other RNA
tggggaagtgaatggcttgg

SEQ ID NO: 463 - RNA, 20 nt, synthetic construct
  misc_feature 1..20: note = Synthetic
  source 1..20: mol_type = other RNA
gattggggaagtgaatggct

SEQ ID NO: 464 - RNA, 20 nt, synthetic construct
  misc_feature 1..20: note = Synthetic
  source 1..20: mol_type = other RNA
gacaagattggggaagtgaa

SEQ ID NO: 465 - RNA, 20 nt, synthetic construct
  misc_feature 1..20: note = Synthetic
  source 1..20: mol_type = other RNA
ttccccaatcttgtcgttga

SEQ ID NO: 466 - RNA, 20 nt, synthetic construct
  misc_feature 1..20: note = Synthetic
  source 1..20: mol_type = other RNA
tccccaatcttgtcgttgat

SEQ ID NO: 467 - RNA, 20 nt, synthetic construct
  misc_feature 1..20: note = Synthetic
  source 1..20: mol_type = other RNA
acccatcaacgacaagattg

SEQ ID NO: 468 - RNA, 20 nt, synthetic construct
  misc_feature 1..20: note = Synthetic
  source 1..20: mol_type = other RNA
tacccatcaacgacaagatt

SEQ ID NO: 469 - RNA, 20 nt, synthetic construct
  misc_feature 1..20: note = Synthetic
  source 1..20: mol_type = other RNA
gtatgtgtttaaaacatgca

SEQ ID NO: 470 - RNA, 20 nt, synthetic construct
  misc_feature 1..20: note = Synthetic
  source 1..20: mol_type = other RNA
tgtttaaaacatgcacggtg

SEQ ID NO: 471 - RNA, 20 nt, synthetic construct
  misc_feature 1..20: note = Synthetic
  source 1..20: mol_type = other RNA
taaaacatgcacggtgaggc

SEQ ID NO: 472 - RNA, 20 nt, synthetic construct
  misc_feature 1..20: note = Synthetic
  source 1..20: mol_type = other RNA
aaaacatgcacggtgaggcc

SEQ ID NO: 473 - RNA, 20 nt, synthetic construct
  misc_feature 1..20: note = Synthetic
  source 1..20: mol_type = other RNA
ggctgctgatgcaccatgca

SEQ ID NO: 474 - RNA, 20 nt, synthetic construct
  misc_feature 1..20: note = Synthetic
  source 1..20: mol_type = other RNA
catggtgcatcagcagccca

SEQ ID NO: 475 - RNA, 20 nt, synthetic construct
  misc_feature 1..20: note = Synthetic
  source 1..20: mol_type = other RNA
catcagcagcccatggcctc

SEQ ID NO: 476 - RNA, 20 nt, synthetic construct
  misc_feature 1..20: note = Synthetic
  source 1..20: mol_type = other RNA
catgcctggccagaggccat

SEQ ID NO: 477 - RNA, 20 nt, synthetic construct
  misc_feature 1..20: note = Synthetic
  source 1..20: mol_type = other RNA
gcctctggccaggcatggcg

SEQ ID NO: 478 - RNA, 20 nt, synthetic construct
  misc_feature 1..20: note = Synthetic
  source 1..20: mol_type = other RNA
gcctcgccatgcctggccag

SEQ ID NO: 479 - RNA, 20 nt, synthetic construct
  misc_feature 1..20: note = Synthetic
  source 1..20: mol_type = other RNA
catctcttaaaaaatgaatt

SEQ ID NO: 480 - RNA, 20 nt, synthetic construct
  misc_feature 1..20: note = Synthetic
  source 1..20: mol_type = other RNA
aaatgaatttggccagacac

SEQ ID NO: 481 - RNA, 20 nt, synthetic construct
  misc_feature 1..20: note = Synthetic
  source 1..20: mol_type = other RNA
tatagttgtatttctgaaat

SEQ ID NO: 482 - RNA, 20 nt, synthetic construct
  misc_feature 1..20: note = Synthetic
  source 1..20: mol_type = other RNA
ctccagtctggatcgtttga

SEQ ID NO: 483 - RNA, 20 nt, synthetic construct
  misc_feature 1..20: note = Synthetic
  source 1..20: mol_type = other RNA
tccagtctggatcgtttgac

SEQ ID NO: 484 - RNA, 20 nt, synthetic construct
  misc_feature 1..20: note = Synthetic
  source 1..20: mol_type = other RNA
cgtcaaacgatccagactgg

SEQ ID NO: 485 - RNA, 20 nt, synthetic construct
  misc_feature 1..20: note = Synthetic
  source 1..20: mol_type = other RNA
tcccgtcaaacgatccagac

SEQ ID NO: 486 - RNA, 20 nt, synthetic construct
  misc_feature 1..20: note = Synthetic
  source 1..20: mol_type = other RNA
ggatcgtttgacgggacttc

SEQ ID NO: 487 - RNA, 20 nt, synthetic construct
  misc_feature 1..20: note = Synthetic
  source 1..20: mol_type = other RNA
acatcagtgcaacagtaaca

SEQ ID NO: 488 - RNA, 20 nt, synthetic construct
  misc_feature 1..20: note = Synthetic
  source 1..20: mol_type = other RNA
ggaggctgtcactgtctctc

SEQ ID NO: 489 - RNA, 20 nt, synthetic construct
  misc_feature 1..20: note = Synthetic
  source 1..20: mol_type = other RNA
ttcacgcgggagtctgacgg

SEQ ID NO: 490 - RNA, 20 nt, synthetic construct
  misc_feature 1..20: note = Synthetic
  source 1..20: mol_type = other RNA
atcttcacgcgggagtctga

SEQ ID NO: 491 - RNA, 20 nt, synthetic construct
  misc_feature 1..20: note = Synthetic
  source 1..20: mol_type = other RNA
tcccgcgtgaagatgtcaca

SEQ ID NO: 492 - RNA, 20 nt, synthetic construct
  misc_feature 1..20: note = Synthetic
  source 1..20: mol_type = other RNA
cccgcgtgaagatgtcacaa

SEQ ID NO: 493 - RNA, 20 nt, synthetic construct
  misc_feature 1..20: note = Synthetic
  source 1..20: mol_type = other RNA
cccttgtgacatcttcacgc

SEQ ID NO: 494 - RNA, 20 nt, synthetic construct
  misc_feature 1..20: note = Synthetic
  source 1..20: mol_type = other RNA
tcccttgtgacatcttcacg

SEQ ID NO: 495 - RNA, 20 nt, synthetic construct
  misc_feature 1..20: note = Synthetic
  source 1..20: mol_type = other RNA
gtgaagatgtcacaagggat

SEQ ID NO: 496 - RNA, 20 nt, synthetic construct
  misc_feature 1..20: note = Synthetic
  source 1..20: mol_type = other RNA
agggattggcaattgtcccc

SEQ ID NO: 497 - RNA, 20 nt, synthetic construct
  misc_feature 1..20: note = Synthetic
  source 1..20: mol_type = other RNA
gggattggcaattgtcccca

SEQ ID NO: 498 - RNA, 20 nt, synthetic construct
  misc_feature 1..20: note = Synthetic
  source 1..20: mol_type = other RNA
gacacagtgttttgtccctg

SEQ ID NO: 499 - RNA, 20 nt, synthetic construct
  misc_feature 1..20: note = Synthetic
  source 1..20: mol_type = other RNA
ggacacagtgttttgtccct

SEQ ID NO: 500 - RNA, 20 nt, synthetic construct
  misc_feature 1..20: note = Synthetic
  source 1..20: mol_type = other RNA
gggacacagtgttttgtccc

SEQ ID NO: 501 - RNA, 20 nt, synthetic construct
  misc_feature 1..20: note = Synthetic
  source 1..20: mol_type = other RNA
cactgtgtcccccccagtgc

SEQ ID NO: 502 - RNA, 20 nt, synthetic construct
  misc_feature 1..20: note = Synthetic
  source 1..20: mol_type = other RNA
actgtgtcccccccagtgca

SEQ ID NO: 503 - RNA, 20 nt, synthetic construct
  misc_feature 1..20: note = Synthetic
  source 1..20: mol_type = other RNA
cacggttccctgcactgggg

SEQ ID NO: 504 - RNA, 20 nt, synthetic construct
  misc_feature 1..20: note = Synthetic
  source 1..20: mol_type = other RNA
tcacggttccctgcactggg

SEQ ID NO: 505 - RNA, 20 nt, synthetic construct
  misc_feature 1..20: note = Synthetic
  source 1..20: mol_type = other RNA
atcacggttccctgcactgg

SEQ ID NO: 506 - RNA, 20 nt, synthetic construct
  misc_feature 1..20: note = Synthetic
  source 1..20: mol_type = other RNA
tatcacggttccctgcactg

SEQ ID NO: 507 - RNA, 20 nt, synthetic construct
  misc_feature 1..20: note = Synthetic
  source 1..20: mol_type = other RNA
ttatcacggttccctgcact

SEQ ID NO: 508 - RNA, 20 nt, synthetic construct
  misc_feature 1..20: note = Synthetic
  source 1..20: mol_type = other RNA
cttatcacggttccctgcac

SEQ ID NO: 509 - RNA, 20 nt, synthetic construct
  misc_feature 1..20: note = Synthetic
  source 1..20: mol_type = other RNA
ggaaccgtgataagcctttc

SEQ ID NO: 510 - RNA, 20 nt, synthetic construct
  misc_feature 1..20: note = Synthetic
  source 1..20: mol_type = other RNA
gtgataagcctttctggttt

SEQ ID NO: 511 - RNA, 20 nt, synthetic construct
  misc_feature 1..20: note = Synthetic
  source 1..20: mol_type = other RNA
gaaaccagaaaggcttatca

SEQ ID NO: 512 - RNA, 20 nt, synthetic construct
  misc_feature 1..20: note = Synthetic
  source 1..20: mol_type = other RNA
tacgtgctccgaaaccagaa

SEQ ID NO: 513 - RNA, 20 nt, synthetic construct
  misc_feature 1..20: note = Synthetic
  source 1..20: mol_type = other RNA
atgcgtccctgtacagatag

SEQ ID NO: 514 - RNA, 20 nt, synthetic construct
  misc_feature 1..20: note = Synthetic
  source 1..20: mol_type = other RNA
tgcgtccctgtacagatagt

SEQ ID NO: 515 - RNA, 20 nt, synthetic construct
  misc_feature 1..20: note = Synthetic
  source 1..20: mol_type = other RNA
gcgtccctgtacagatagtg

SEQ ID NO: 516 - RNA, 20 nt, synthetic construct
  misc_feature 1..20: note = Synthetic
  source 1..20: mol_type = other RNA
aaatccccactatctgtaca

SEQ ID NO: 517 - RNA, 20 nt, synthetic construct
  misc_feature 1..20: note = Synthetic
  source 1..20: mol_type = other RNA
aaaatccccactatctgtac

SEQ ID NO: 518 - RNA, 20 nt, synthetic construct
  misc_feature 1..20: note = Synthetic
  source 1..20: mol_type = other RNA
tatgtttgcactttgtatat

SEQ ID NO: 519 - RNA, 20 nt, synthetic construct
  misc_feature 1..20: note = Synthetic
  source 1..20: mol_type = other RNA
ctatttatttttgcaaaccc

SEQ ID NO: 520 - RNA, 20 nt, synthetic construct
  misc_feature 1..20: note = Synthetic
  source 1..20: mol_type = other RNA
ctgaacaaatacagcaacca

SEQ ID NO: 521 - RNA, 20 nt, synthetic construct
  misc_feature 1..20: note = Synthetic
  source 1..20: mol_type = other RNA
actgaacaaatacagcaacc

SEQ ID NO: 522 - RNA, 20 nt, synthetic construct
  misc_feature 1..20: note = Synthetic
  source 1..20: mol_type = other RNA
atttgttcagtgactattct

SEQ ID NO: 523 - RNA, 20 nt, synthetic construct
  misc_feature 1..20: note = Synthetic
  source 1..20: mol_type = other RNA
tttgttcagtgactattctc

SEQ ID NO: 524 - RNA, 20 nt, synthetic construct
  misc_feature 1..20: note = Synthetic
  source 1..20: mol_type = other RNA
ttgttcagtgactattctcg

SEQ ID NO: 525 - RNA, 20 nt, synthetic construct
  misc_feature 1..20: note = Synthetic
  source 1..20: mol_type = other RNA
ctattctcggggccctgtgt

SEQ ID NO: 526 - RNA, 20 nt, synthetic construct
  misc_feature 1..20: note = Synthetic
  source 1..20: mol_type = other RNA
tattctcggggccctgtgta

SEQ ID NO: 527 - RNA, 20 nt, synthetic construct
  misc_feature 1..20: note = Synthetic
  source 1..20: mol_type = other RNA
attctcggggccctgtgtag

SEQ ID NO: 528 - RNA, 20 nt, synthetic construct
  misc_feature 1..20: note = Synthetic
  source 1..20: mol_type = other RNA
ttctcggggccctgtgtagg

SEQ ID NO: 529 - RNA, 20 nt, synthetic construct
  misc_feature 1..20: note = Synthetic
  source 1..20: mol_type = other RNA
aggcaataaccccctacaca

SEQ ID NO: 530 - RNA, 20 nt, synthetic construct
  misc_feature 1..20: note = Synthetic
  source 1..20: mol_type = other RNA
gaggcaataaccccctacac

SEQ ID NO: 531 - RNA, 20 nt, synthetic construct
  misc_feature 1..20: note = Synthetic
  source 1..20: mol_type = other RNA
ataaagaagaggcatttcag

SEQ ID NO: 532 - RNA, 20 nt, synthetic construct
  misc_feature 1..20: note = Synthetic
  source 1..20: mol_type = other RNA
aatctttgtacataaagaag

SEQ ID NO: 533 - RNA, 20 nt, synthetic construct
  misc_feature 1..20: note = Synthetic
  source 1..20: mol_type = other RNA
caaagattatttgcacgaac

SEQ ID NO: 534 - RNA, 20 nt, synthetic construct
  misc_feature 1..20: note = Synthetic
  source 1..20: mol_type = other RNA
ggactgtgtgcaacgctttt

SEQ ID NO: 535 - RNA, 20 nt, synthetic construct
  misc_feature 1..20: note = Synthetic
  source 1..20: mol_type = other RNA
gactgtgtgcaacgcttttt

SEQ ID NO: 536 - RNA, 20 nt, synthetic construct
  misc_feature 1..20: note = Synthetic
  source 1..20: mol_type = other RNA
gtccccgttgtatgtatgag

SEQ ID NO: 537 - RNA, 20 nt, synthetic construct
  misc_feature 1..20: note = Synthetic
  source 1..20: mol_type = other RNA
agccactcatacatacaacg

SEQ ID NO: 538 - RNA, 20 nt, synthetic construct
  misc_feature 1..20: note = Synthetic
  source 1..20: mol_type = other RNA
aagccactcatacatacaac

SEQ ID NO: 539 - RNA, 20 nt, synthetic construct
  misc_feature 1..20: note = Synthetic
  source 1..20: mol_type = other RNA
gaagccactcatacatacaa

SEQ ID NO: 540 - RNA, 20 nt, synthetic construct
  misc_feature 1..20: note = Synthetic
  source 1..20: mol_type = other RNA
ttgtatgtatgagtggcttc

SEQ ID NO: 541 - RNA, 20 nt, synthetic construct
  misc_feature 1..20: note = Synthetic
  source 1..20: mol_type = other RNA
tgtatgtatgagtggcttct

SEQ ID NO: 542 - RNA, 20 nt, synthetic construct
  misc_feature 1..20: note = Synthetic
  source 1..20: mol_type = other RNA
tatgagtggcttctgggaga

SEQ ID NO: 543 - RNA, 20 nt, synthetic construct
  misc_feature 1..20: note = Synthetic
  source 1..20: mol_type = other RNA
atgagtggcttctgggagat

SEQ ID NO: 544 - RNA, 20 nt, synthetic construct
  misc_feature 1..20: note = Synthetic
  source 1..20: mol_type = other RNA
tacaaaaaccttctatacag

SEQ ID NO: 545 - RNA, 20 nt, synthetic construct
  misc_feature 1..20: note = Synthetic
  source 1..20: mol_type = other RNA
ttgatcacagtaagacattc

SEQ ID NO: 546 - RNA, 20 nt, synthetic construct
  misc_feature 1..20: note = Synthetic
  source 1..20: mol_type = other RNA
tgcatcgagtttagacaaat

SEQ ID NO: 547 - RNA, 20 nt, synthetic construct
  misc_feature 1..20: note = Synthetic
  source 1..20: mol_type = other RNA
ttagcgttggccacccgcgg

SEQ ID NO: 548 - RNA, 20 nt, synthetic construct
  misc_feature 1..20: note = Synthetic
  source 1..20: mol_type = other RNA
aaattagcgttggccacccg

SEQ ID NO: 549 - DNA, 21 bp, Homo sapiens
  source 1..21: mol_type = genomic DNA
aataaaacaaggccggcgagg

SEQ ID NO: 550 - DNA, 21 bp, Homo sapiens
  source 1..21: mol_type = genomic DNA
ttcatctgggaggcagaacag

SEQ ID NO: 551 - DNA, 21 bp, Homo sapiens
  source 1..21: mol_type = genomic DNA
gtttcttcctttcctcgtgaa

SEQ ID NO: 552 - DNA, 21 bp, Homo sapiens
  source 1..21: mol_type = genomic DNA
ttcctttcctcgtgaaggata

SEQ ID NO: 553 - DNA, 21 bp, Homo sapiens
  source 1..21: mol_type = genomic DNA
tcttatccttcacgaggaaag

SEQ ID NO: 554 - DNA, 21 bp, Homo sapiens
  source 1..21: mol_type = genomic DNA
agtttctctccaccgtgacac

SEQ ID NO: 555 - DNA, 21 bp, Homo sapiens
  source 1..21: mol_type = genomic DNA
aggattgtgtcacggtggaga

SEQ ID NO: 556 - DNA, 21 bp, Homo sapiens
  source 1..21: mol_type = genomic DNA
tctccaccgtgacacaatcct

SEQ ID NO: 557 - DNA, 21 bp, Homo sapiens
  source 1..21: mol_type = genomic DNA
atcttccatgtttgaggattg

SEQ ID NO: 558 - DNA, 21 bp, Homo sapiens
  source 1..21: mol_type = genomic DNA
aacacacaacagcagatggca

SEQ ID NO: 559 - DNA, 21 bp, Homo sapiens
  source 1..21: mol_type = genomic DNA
cctcttctatgcaagccttgc

SEQ ID NO: 560 - DNA, 21 bp, Homo sapiens
  source 1..21: mol_type = genomic DNA
gaggtgggtttgtaccttcct

SEQ ID NO: 561 - DNA, 21 bp, Homo sapiens
  source 1..21: mol_type = genomic DNA
ctggcttaaggaaggtacaaa

SEQ ID NO: 562 - DNA, 21 bp, Homo sapiens
  source 1..21: mol_type = genomic DNA
cgacgccatgaatccctttcc

SEQ ID NO: 563 - DNA, 21 bp, Homo sapiens
  source 1..21: mol_type = genomic DNA
gtctcggtgccaccacggatt

SEQ ID NO: 564 - DNA, 21 bp, Homo sapiens
  source 1..21: mol_type = genomic DNA
gtgaatgagtttggtctcggt

SEQ ID NO: 565 - DNA, 21 bp, Homo sapiens
  source 1..21: mol_type = genomic DNA
ttaagtgcctgagacacccgg

SEQ ID NO: 566 - DNA, 21 bp, Homo sapiens
  source 1..21: mol_type = genomic DNA
tcagttcagagttgtacactg

SEQ ID NO: 567 - DNA, 21 bp, Homo sapiens
  source 1..21: mol_type = genomic DNA
cactgttttctgtcgtgtgtg

SEQ ID NO: 568 - DNA, 21 bp, Homo sapiens
  source 1..21: mol_type = genomic DNA
aagtcccggtcaacctgcccc

SEQ ID NO: 569 - DNA, 21 bp, Homo sapiens
  source 1..21: mol_type = genomic DNA
tgtccgcccacctagtgcttc

SEQ ID NO: 570 - DNA, 21 bp, Homo sapiens
  source 1..21: mol_type = genomic DNA
catagaagtggaagcactagg

SEQ ID NO: 571 - DNA, 21 bp, Homo sapiens
  source 1..21: mol_type = genomic DNA
aacacatacccatcaacgaca

SEQ ID NO: 572 - DNA, 21 bp, Homo sapiens
  source 1..21: mol_type = genomic DNA
aaacatgcacggtgaggccgg

SEQ ID NO: 573 - DNA, 21 bp, Homo sapiens
  source 1..21: mol_type = genomic DNA
acgggacttcaggttctttct

SEQ ID NO: 574 - DNA, 21 bp, Homo sapiens
  source 1..21: mol_type = genomic DNA
agaaagaacctgaagtcccgt

SEQ ID NO: 575 - DNA, 21 bp, Homo sapiens
  source 1..21: mol_type = genomic DNA
tgaaatcgccgtgttactgtt

SEQ ID NO: 576 - DNA, 21 bp, Homo sapiens
  source 1..21: mol_type = genomic DNA
tccctggggacaattgccaat

SEQ ID NO: 577 - DNA, 21 bp, Homo sapiens
  source 1..21: mol_type = genomic DNA
cgtgctccgaaaccagaaagg

SEQ ID NO: 578 - DNA, 21 bp, Homo sapiens
  source 1..21: mol_type = genomic DNA
tggtttcggagcacgtaaatg

SEQ ID NO: 579 - DNA, 21 bp, Homo sapiens
  source 1..21: mol_type = genomic DNA
ggagcacgtaaatgcgtccct

SEQ ID NO: 580 - DNA, 21 bp, Homo sapiens
  source 1..21: mol_type = genomic DNA
aaccaatatacaaagtgcaaa

SEQ ID NO: 581 - DNA, 21 bp, Homo sapiens
  source 1..21: mol_type = genomic DNA
cactttgtatattggttgaaa

SEQ ID NO: 582 - DNA, 21 bp, Homo sapiens
  source 1..21: mol_type = genomic DNA
tatattggttgaaactgttat

SEQ ID NO: 583 - DNA, 21 bp, Homo sapiens
  source 1..21: mol_type = genomic DNA
tttttgcaaaccctggttgct

SEQ ID NO: 584 - DNA, 21 bp, Homo sapiens
  source 1..21: mol_type = genomic DNA
caaaccctggttgctgtattt

SEQ ID NO: 585 - DNA, 21 bp, Homo sapiens
  source 1..21: mol_type = genomic DNA
agaggcaataaccccctacac

SEQ ID NO: 586 - DNA, 21 bp, Homo sapiens
  source 1..21: mol_type = genomic DNA
tacataaagaagaggcatttc

SEQ ID NO: 587 - DNA, 21 bp, Homo sapiens
  source 1..21: mol_type = genomic DNA
tgtacaaagattatttgcacg

SEQ ID NO: 588 - DNA, 21 bp, Homo sapiens
  source 1..21: mol_type = genomic DNA
cacgaactggactgtgtgcaa

SEQ ID NO: 589 - DNA, 21 bp, Homo sapiens
  source 1..21: mol_type = genomic DNA
ggagaatgatgtccccgttgt

SEQ ID NO: 590 - DNA, 21 bp, Homo sapiens
  source 1..21: mol_type = genomic DNA
aaccactgtatagaaggtttt

SEQ ID NO: 591 - DNA, 21 bp, Homo sapiens
  source 1..21: mol_type = genomic DNA
tagcctgaatgtcttactgtg

SEQ ID NO: 592 - DNA, 21 bp, Homo sapiens
  source 1..21: mol_type = genomic DNA
attgatcacagtaagacattc

SEQ ID NO: 593 - DNA, 21 bp, Homo sapiens
  source 1..21: mol_type = genomic DNA
agaaatttaattgatcacagt

SEQ ID NO: 594 - DNA, 21 bp, Homo sapiens
  source 1..21: mol_type = genomic DNA
gacaaattggttcatttaaga

SEQ ID NO: 595 - DNA, 21 bp, Homo sapiens
  source 1..21: mol_type = genomic DNA
ttaaatgaaccaatttgtcta

SEQ ID NO: 596 - DNA, 21 bp, Homo sapiens
  source 1..21: mol_type = genomic DNA
tctaaactcgatgcacgttct

SEQ ID NO: 597 - DNA, 21 bp, Homo sapiens
  source 1..21: mol_type = genomic DNA
tggattggactccccaggaga

SEQ ID NO: 598 - DNA, 21 bp, Homo sapiens
  source 1..21: mol_type = genomic DNA
tcaagtcccctgctcatccat

SEQ ID NO: 599 - DNA, 21 bp, Homo sapiens
  source 1..21: mol_type = genomic DNA
tcgagtgtatgaatggatgag

SEQ ID NO: 600 - DNA, 21 bp, Homo sapiens
  source 1..21: mol_type = genomic DNA
ttatatcccctgtagtgtccc

SEQ ID NO: 601 - DNA, 21 bp, Homo sapiens
  source 1..21: mol_type = genomic DNA
atttcttatatcccctgtagt

SEQ ID NO: 602 - DNA, 21 bp, Homo sapiens
  source 1..21: mol_type = genomic DNA
ttcagggggagtttctctaat

SEQ ID NO: 603 - DNA, 21 bp, Homo sapiens
  source 1..21: mol_type = genomic DNA
tggtgcagtcacctgccagca

SEQ ID NO: 604 - DNA, 21 bp, Homo sapiens
  source 1..21: mol_type = genomic DNA
tggtggtggcgctttctgctg

SEQ ID NO: 605 - DNA, 21 bp, Homo sapiens
  source 1..21: mol_type = genomic DNA
cctcctatgagtttctggctc

SEQ ID NO: 606 - DNA, 21 bp, Homo sapiens
  source 1..21: mol_type = genomic DNA
tggacctaaccaccccagtgt

SEQ ID NO: 607 - RNA, 21 nt, synthetic construct
  misc_feature 1..21: note = Synthetic
  source 1..21: mol_type = other RNA
aataaaacaaggccggcgagg

SEQ ID NO: 608 - RNA, 21 nt, synthetic construct
  misc_feature 1..21: note = Synthetic
  source 1..21: mol_type = other RNA
ttcatctgggaggcagaacag

SEQ ID NO: 609 - RNA, 21 nt, synthetic construct
  misc_feature 1..21: note = Synthetic
  source 1..21: mol_type = other RNA
gtttcttcctttcctcgtgaa

SEQ ID NO: 610 - RNA, 21 nt, synthetic construct
  misc_feature 1..21: note = Synthetic
  source 1..21: mol_type = other RNA
ttcctttcctcgtgaaggata

SEQ ID NO: 611 - RNA, 21 nt, synthetic construct
  misc_feature 1..21: note = Synthetic
  source 1..21: mol_type = other RNA
tcttatccttcacgaggaaag

SEQ ID NO: 612 - RNA, 21 nt, synthetic construct
  misc_feature 1..21: note = Synthetic
  source 1..21: mol_type = other RNA
agtttctctccaccgtgacac

SEQ ID NO: 613 - RNA, 21 nt, synthetic construct
  misc_feature 1..21: note = Synthetic
  source 1..21: mol_type = other RNA
aggattgtgtcacggtggaga

SEQ ID NO: 614 - RNA, 21 nt, synthetic construct
  misc_feature 1..21: note = Synthetic
  source 1..21: mol_type = other RNA
tctccaccgtgacacaatcct

SEQ ID NO: 615 - RNA, 21 nt, synthetic construct
  misc_feature 1..21: note = Synthetic
  source 1..21: mol_type = other RNA
atcttccatgtttgaggattg

SEQ ID NO: 616 - RNA, 21 nt, synthetic construct
  misc_feature 1..21: note = Synthetic
  source 1..21: mol_type = other RNA
aacacacaacagcagatggca

SEQ ID NO: 617 - RNA, 21 nt, synthetic construct
  misc_feature 1..21: note = Synthetic
  source 1..21: mol_type = other RNA
cctcttctatgcaagccttgc

SEQ ID NO: 618 - RNA, 21 nt, synthetic construct
  misc_feature 1..21: note = Synthetic
  source 1..21: mol_type = other RNA
gaggtgggtttgtaccttcct

SEQ ID NO: 619 - RNA, 21 nt, synthetic construct
  misc_feature 1..21: note = Synthetic
  source 1..21: mol_type = other RNA
ctggcttaaggaaggtacaaa

SEQ ID NO: 620 - RNA, 21 nt, synthetic construct
  misc_feature 1..21: note = Synthetic
  source 1..21: mol_type = other RNA
cgacgccatgaatccctttcc

SEQ ID NO: 621 - RNA, 21 nt, synthetic construct
  misc_feature 1..21: note = Synthetic
  source 1..21: mol_type = other RNA
gtctcggtgccaccacggatt

SEQ ID NO: 622 - RNA, 21 nt, synthetic construct
  misc_feature 1..21: note = Synthetic
  source 1..21: mol_type = other RNA
gtgaatgagtttggtctcggt

SEQ ID NO: 623 - RNA, 21 nt, synthetic construct
  misc_feature 1..21: note = Synthetic
  source 1..21: mol_type = other RNA
ttaagtgcctgagacacccgg

SEQ ID NO: 624 - RNA, 21 nt, synthetic construct
  misc_feature 1..21: note = Synthetic
  source 1..21: mol_type = other RNA
tcagttcagagttgtacactg

SEQ ID NO: 625 - RNA, 21 nt, synthetic construct
  misc_feature 1..21: note = Synthetic
  source 1..21: mol_type = other RNA
cactgttttctgtcgtgtgtg

SEQ ID NO: 626 - RNA, 21 nt, synthetic construct
  misc_feature 1..21: note = Synthetic
  source 1..21: mol_type = other RNA
aagtcccggtcaacctgcccc

SEQ ID NO: 627 - RNA, 21 nt, synthetic construct
  misc_feature 1..21: note = Synthetic
  source 1..21: mol_type = other RNA
tgtccgcccacctagtgcttc

SEQ ID NO: 628 - RNA, 21 nt, synthetic construct
  misc_feature 1..21: note = Synthetic
  source 1..21: mol_type = other RNA
catagaagtggaagcactagg

SEQ ID NO: 629 - RNA, 21 nt, synthetic construct
  misc_feature 1..21: note = Synthetic
  source 1..21: mol_type = other RNA
aacacatacccatcaacgaca

SEQ ID NO: 630 - RNA, 21 nt, synthetic construct
  misc_feature 1..21: note = Synthetic
  source 1..21: mol_type = other RNA
aaacatgcacggtgaggccgg

SEQ ID NO: 631 - RNA, 21 nt, synthetic construct
  misc_feature 1..21: note = Synthetic
  source 1..21: mol_type = other RNA
acgggacttcaggttctttct

SEQ ID NO: 632 - RNA, 21 nt, synthetic construct
  misc_feature 1..21: note = Synthetic
  source 1..21: mol_type = other RNA
agaaagaacctgaagtcccgt

SEQ ID NO: 633 - RNA, 21 nt, synthetic construct
  misc_feature 1..21: note = Synthetic
  source 1..21: mol_type = other RNA
tgaaatcgccgtgttactgtt

SEQ ID NO: 634 - RNA, 21 nt, synthetic construct
  misc_feature 1..21: note = Synthetic
  source 1..21: mol_type = other RNA
tccctggggacaattgccaat

SEQ ID NO: 635 - RNA, 21 nt, synthetic construct
  misc_feature 1..21: note = Synthetic
  source 1..21: mol_type = other RNA
cgtgctccgaaaccagaaagg

SEQ ID NO: 636 - RNA, 21 nt, synthetic construct
  misc_feature 1..21: note = Synthetic
  source 1..21: mol_type = other RNA
tggtttcggagcacgtaaatg

SEQ ID NO: 637 - RNA, 21 nt, synthetic construct
  misc_feature 1..21: note = Synthetic
  source 1..21: mol_type = other RNA
ggagcacgtaaatgcgtccct

SEQ ID NO: 638 - RNA, 21 nt, synthetic construct
  misc_feature 1..21: note = Synthetic
  source 1..21: mol_type = other RNA
aaccaatatacaaagtgcaaa

SEQ ID NO: 639 - RNA, 21 nt, synthetic construct
  misc_feature 1..21: note = Synthetic
  source 1..21: mol_type = other RNA
cactttgtatattggttgaaa

SEQ ID NO: 640 - RNA, 21 nt, synthetic construct
  misc_feature 1..21: note = Synthetic
  source 1..21: mol_type = other RNA
tatattggttgaaactgttat

SEQ ID NO: 641 - RNA, 21 nt, synthetic construct
  misc_feature 1..21: note = Synthetic
  source 1..21: mol_type = other RNA
tttttgcaaaccctggttgct

SEQ ID NO: 642 - RNA, 21 nt, synthetic construct
  misc_feature 1..21: note = Synthetic
  source 1..21: mol_type = other RNA
caaaccctggttgctgtattt

SEQ ID NO: 643 - RNA, 21 nt, synthetic construct
  misc_feature 1..21: note = Synthetic
  source 1..21: mol_type = other RNA
agaggcaataaccccctacac

SEQ ID NO: 644 - RNA, 21 nt, synthetic construct
  misc_feature 1..21: note = Synthetic
  source 1..21: mol_type = other RNA
tacataaagaagaggcatttc

SEQ ID NO: 645 - RNA, 21 nt, synthetic construct
  misc_feature 1..21: note = Synthetic
  source 1..21: mol_type = other RNA
tgtacaaagattatttgcacg

SEQ ID NO: 646 - RNA, 21 nt, synthetic construct
  misc_feature 1..21: note = Synthetic
  source 1..21: mol_type = other RNA
cacgaactggactgtgtgcaa

SEQ ID NO: 647 - RNA, 21 nt, synthetic construct
  misc_feature 1..21: note = Synthetic
  source 1..21: mol_type = other RNA
ggagaatgatgtccccgttgt

SEQ ID NO: 648 - RNA, 21 nt, synthetic construct
  misc_feature 1..21: note = Synthetic
  source 1..21: mol_type = other RNA
aaccactgtatagaaggtttt

SEQ ID NO: 649 - RNA, 21 nt, synthetic construct
  misc_feature 1..21: note = Synthetic
  source 1..21: mol_type = other RNA
tagcctgaatgtcttactgtg

SEQ ID NO: 650 - RNA, 21 nt, synthetic construct
  misc_feature 1..21: note = Synthetic
  source 1..21: mol_type = other RNA
attgatcacagtaagacattc

SEQ ID NO: 651 - RNA, 21 nt, synthetic construct
  misc_feature 1..21: note = Synthetic
  source 1..21: mol_type = other RNA
agaaatttaattgatcacagt

SEQ ID NO: 652 - RNA, 21 nt, synthetic construct
  misc_feature 1..21: note = Synthetic
  source 1..21: mol_type = other RNA
gacaaattggttcatttaaga

SEQ ID NO: 653 - RNA, 21 nt, synthetic construct
  misc_feature 1..21: note = Synthetic
  source 1..21: mol_type = other RNA
ttaaatgaaccaatttgtcta

SEQ ID NO: 654 - RNA, 21 nt, synthetic construct
  misc_feature 1..21: note = Synthetic
  source 1..21: mol_type = other RNA
tctaaactcgatgcacgttct

SEQ ID NO: 655 - RNA, 21 nt, synthetic construct
  misc_feature 1..21: note = Synthetic
  source 1..21: mol_type = other RNA
tggattggactccccaggaga

SEQ ID NO: 656 - RNA, 21 nt, synthetic construct
  misc_feature 1..21: note = Synthetic
  source 1..21: mol_type = other RNA
tcaagtcccctgctcatccat

SEQ ID NO: 657 - RNA, 21 nt, synthetic construct
  misc_feature 1..21: note = Synthetic
  source 1..21: mol_type = other RNA
tcgagtgtatgaatggatgag

SEQ ID NO: 658 - RNA, 21 nt, synthetic construct
  misc_feature 1..21: note = Synthetic
  source 1..21: mol_type = other RNA
ttatatcccctgtagtgtccc

SEQ ID NO: 659 - RNA, 21 nt, synthetic construct
  misc_feature 1..21: note = Synthetic
  source 1..21: mol_type = other RNA
atttcttatatcccctgtagt

SEQ ID NO: 660 - RNA, 21 nt, synthetic construct
  misc_feature 1..21: note = Synthetic
  source 1..21: mol_type = other RNA
ttcagggggagtttctctaat

SEQ ID NO: 661 - RNA, 21 nt, synthetic construct
  misc_feature 1..21: note = Synthetic
  source 1..21: mol_type = other RNA
tggtgcagtcacctgccagca

SEQ ID NO: 662 - RNA, 21 nt, synthetic construct
  misc_feature 1..21: note = Synthetic
  source 1..21: mol_type = other RNA
tggtggtggcgctttctgctg

SEQ ID NO: 663 - RNA, 21 nt, synthetic construct
  misc_feature 1..21: note = Synthetic
  source 1..21: mol_type = other RNA
cctcctatgagtttctggctc

SEQ ID NO: 664 - RNA, 21 nt, synthetic construct
  misc_feature 1..21: note = Synthetic
  source 1..21: mol_type = other RNA
tggacctaaccaccccagtgt

SEQ ID NO: 665 - DNA, 21 bp, Homo sapiens
  source 1..21: mol_type = genomic DNA
ggcagatgttcacgccacgtc

SEQ ID NO: 666 - DNA, 21 bp, Homo sapiens
  source 1..21: mol_type = genomic DNA
tgagacctcgccggccttgtt

SEQ ID NO: 667 - DNA, 21 bp, Homo sapiens
  source 1..21: mol_type = genomic DNA
tctgggaggcagaacaggctt

SEQ ID NO: 668 - DNA, 21 bp, Homo sapiens
  source 1..21: mol_type = genomic DNA
aagcctgttctgcctcccaga

SEQ ID NO: 669 - DNA, 21 bp, Homo sapiens
  source 1..21: mol_type = genomic DNA
cgaggaaaggaagaaaccaaa

SEQ ID NO: 670 - DNA, 21 bp, Homo sapiens
  source 1..21: mol_type = genomic DNA
tttcctcgtgaaggataagag

SEQ ID NO: 671 - DNA, 21 bp, Homo sapiens
  source 1..21: mol_type = genomic DNA
cccgggcctgtttctcttatc

SEQ ID NO: 672 - DNA, 21 bp, Homo sapiens
  source 1..21: mol_type = genomic DNA
ggaagttttgagtttctctcc

SEQ ID NO: 673 - DNA, 21 bp, Homo sapiens
  source 1..21: mol_type = genomic DNA
ccgtgacacaatcctcaaaca

SEQ ID NO: 674 - DNA, 21 bp, Homo sapiens
  source 1..21: mol_type = genomic DNA
tgtttgaggattgtgtcacgg

SEQ ID NO: 675 - DNA, 21 bp, Homo sapiens
  source 1..21: mol_type = genomic DNA
atgtttgaggattgtgtcacg

SEQ ID NO: 676 - DNA, 21 bp, Homo sapiens
  source 1..21: mol_type = genomic DNA
tcttccatgtttgaggattgt

SEQ ID NO: 677 - DNA, 21 bp, Homo sapiens
  source 1..21: mol_type = genomic DNA
ctttcatcttccatgtttgag

SEQ ID NO: 678 - DNA, 21 bp, Homo sapiens
  source 1..21: mol_type = genomic DNA
acacacaacagcagatggcac

SEQ ID NO: 679 - DNA, 21 bp, Homo sapiens
  source 1..21: mol_type = genomic DNA
gttggtgccatctgctgttgt

SEQ ID NO: 680 - DNA, 21 bp, Homo sapiens
  source 1..21: mol_type = genomic DNA
tggcttaaggaaggtacaaac

SEQ ID NO: 681 - DNA, 21 bp, Homo sapiens
  source 1..21: mol_type = genomic DNA
ttaagccaggaaagggattca

SEQ ID NO: 682 - DNA, 21 bp, Homo sapiens
  source 1..21: mol_type = genomic DNA
acgccatgaatccctttcctg

SEQ ID NO: 683 - DNA, 21 bp, Homo sapiens
  source 1..21: mol_type = genomic DNA
gacgccatgaatccctttcct

SEQ ID NO: 684 - DNA, 21 bp, Homo sapiens
  source 1..21: mol_type = genomic DNA
tggcgtcggaaatgatctggc

SEQ ID NO: 685 - DNA, 21 bp, Homo sapiens
  source 1..21: mol_type = genomic DNA
gccagatcatttccgacgcca

SEQ ID NO: 686 - DNA, 21 bp, Homo sapiens
  source 1..21: mol_type = genomic DNA
tggtggcaccgagaccaaact

SEQ ID NO: 687 - DNA, 21 bp, Homo sapiens
  source 1..21: mol_type = genomic DNA
ccaaatgatgccacttcccag

SEQ ID NO: 688 - DNA, 21 bp, Homo sapiens
  source 1..21: mol_type = genomic DNA
attcccgtggtctccttgcac

SEQ ID NO: 689 - DNA, 21 bp, Homo sapiens
  source 1..21: mol_type = genomic DNA
ttcccgtggtctccttgcact

SEQ ID NO: 690 - DNA, 21 bp, Homo sapiens
  source 1..21: mol_type = genomic DNA
cgtggtctccttgcactttct

SEQ ID NO: 691 - DNA, 21 bp, Homo sapiens
  source 1..21: mol_type = genomic DNA
gagttgtacactgtgtacatt

SEQ ID NO: 692 - DNA, 21 bp, Homo sapiens
  source 1..21: mol_type = genomic DNA
atcccaacacacacgacagaa

SEQ ID NO: 693 - DNA, 21 bp, Homo sapiens
  source 1..21: mol_type = genomic DNA
tggcctgggatcccatcccaa

SEQ ID NO: 694 - DNA, 21 bp, Homo sapiens
  source 1..21: mol_type = genomic DNA
aggccagggaaagcccgtgtc

SEQ ID NO: 695 - DNA, 21 bp, Homo sapiens
  source 1..21: mol_type = genomic DNA
ttgacacgggctttccctggc

SEQ ID NO: 696 - DNA, 21 bp, Homo sapiens
  source 1..21: mol_type = genomic DNA
cggcattcattgacacgggct

SEQ ID NO: 697 - DNA, 21 bp, Homo sapiens
  source 1..21: mol_type = genomic DNA
ggtcaacctgcccctctctgt

SEQ ID NO: 698 - DNA, 21 bp, Homo sapiens
  source 1..21: mol_type = genomic DNA
cgatcacggctttgaagtccc

SEQ ID NO: 699 - DNA, 21 bp, Homo sapiens
  source 1..21: mol_type = genomic DNA
aagccgtgatcgtgaatatcg

SEQ ID NO: 700 - DNA, 21 bp, Homo sapiens
  source 1..21: mol_type = genomic DNA
cccacctagtgcttccacttc

SEQ ID NO: 701 - DNA, 21 bp, Homo sapiens
  source 1..21: mol_type = genomic DNA
acttctatgcaaatgcctcca

SEQ ID NO: 702 - DNA, 21 bp, Homo sapiens
  source 1..21: mol_type = genomic DNA
cttctatgcaaatgcctccaa

SEQ ID NO: 703 - DNA, 21 bp, Homo sapiens
  source 1..21: mol_type = genomic DNA
cttccccaatcttgtcgttga

SEQ ID NO: 704 - DNA, 21 bp, Homo sapiens
  source 1..21: mol_type = genomic DNA
gtctggatcgtttgacgggac

SEQ ID NO: 705 - DNA, 21 bp, Homo sapiens
  source 1..21: mol_type = genomic DNA
gaaagaacctgaagtcccgtc

SEQ ID NO: 706 - DNA, 21 bp, Homo sapiens
  source 1..21: mol_type = genomic DNA
ggttctttctgaaatcgccgt

SEQ ID NO: 707 - DNA, 21 bp, Homo sapiens
  source 1..21: mol_type = genomic DNA
gagagacagtgacagcctccg

SEQ ID NO: 708 - DNA, 21 bp, Homo sapiens
  source 1..21: mol_type = genomic DNA
cgcgggagtctgacggaggct

SEQ ID NO: 709 - DNA, 21 bp, Homo sapiens
  source 1..21: mol_type = genomic DNA
tcagactcccgcgtgaagatg

SEQ ID NO: 710 - DNA, 21 bp, Homo sapiens
  source 1..21: mol_type = genomic DNA
ttgtgacatcttcacgcggga

SEQ ID NO: 711 - DNA, 21 bp, Homo sapiens
  source 1..21: mol_type = genomic DNA
gcgtgaagatgtcacaaggga

SEQ ID NO: 712 - DNA, 21 bp, Homo sapiens
  source 1..21: mol_type = genomic DNA
tggggacaattgccaatccct

SEQ ID NO: 713 - DNA, 21 bp, Homo sapiens
  source 1..21: mol_type = genomic DNA
cagggacaaaacactgtgtcc

SEQ ID NO: 714 - DNA, 21 bp, Homo sapiens
  source 1..21: mol_type = genomic DNA
tgcactgggggggacacagtg

SEQ ID NO: 715 - DNA, 21 bp, Homo sapiens
  source 1..21: mol_type = genomic DNA
ctgcactgggggggacacagt

SEQ ID NO: 716 - DNA, 21 bp, Homo sapiens
  source 1..21: mol_type = genomic DNA
ccccagtgcagggaaccgtga

SEQ ID NO: 717 - DNA, 21 bp, Homo sapiens
  source 1..21: mol_type = genomic DNA
aaaccagaaaggcttatcacg

SEQ ID NO: 718 - DNA, 21 bp, Homo sapiens
  source 1..21: mol_type = genomic DNA
gagcacgtaaatgcgtccctg

SEQ ID NO: 719 - DNA, 21 bp, Homo sapiens
  source 1..21: mol_type = genomic DNA
cactatctgtacagggacgca

SEQ ID NO: 720 - DNA, 21 bp, Homo sapiens
  source 1..21: mol_type = genomic DNA
tgtacagatagtggggatttt

SEQ ID NO: 721 - DNA, 21 bp, Homo sapiens
  source 1..21: mol_type = genomic DNA
gtgactattctcggggccctg

SEQ ID NO: 722 - DNA, 21 bp, Homo sapiens
  source 1..21: mol_type = genomic DNA
gaggcaataaccccctacaca

SEQ ID NO: 723 - DNA, 21 bp, synthetic construct
  misc_feature 1..21: note = Synthetic
  source 1..21: mol_type = other DNA
gttcgtgcaaataatctttgt

SEQ ID NO: 724 - DNA, 21 bp, synthetic construct
  misc_feature 1..21: note = Synthetic
  source 1..21: mol_type = other DNA
aaaaagcgttgcacacagtcc

SEQ ID NO: 725 - DNA, 21 bp, synthetic construct
  misc_feature 1..21: note = Synthetic
  source 1..21: mol_type = other DNA
cgttgtatgtatgagtggctt

SEQ ID NO: 726 - DNA, 21 bp, synthetic construct
  misc_feature 1..21: note = Synthetic
  source 1..21: mol_type = other DNA
ggctacaaaaaccttctatac

SEQ ID NO: 727 - DNA, 21 bp, synthetic construct
  misc_feature 1..21: note = Synthetic
  source 1..21: mol_type = other DNA
tttaagaaatttaattgatca

SEQ ID NO: 728 - DNA, 21 bp, synthetic construct
  misc_feature 1..21: note = Synthetic
  source 1..21: mol_type = other DNA
agaactccgggcaagatgcaa

SEQ ID NO: 729 - DNA, 21 bp, synthetic construct
  misc_feature 1..21: note = Synthetic
  source 1..21: mol_type = other DNA
ggcaagatgcaatctccgtgg

SEQ ID NO: 730 - DNA, 21 bp, synthetic construct
  misc_feature 1..21: note = Synthetic
  source 1..21: mol_type = other DNA
actcagagaagcgacagcaga

SEQ ID NO: 731 - DNA, 21 bp, synthetic construct
  misc_feature 1..21: note = Synthetic
  source 1..21: mol_type = other DNA
ctgctcatccattcatacact

SEQ ID NO: 732 - DNA, 21 bp, synthetic construct
  misc_feature 1..21: note = Synthetic
  source 1..21: mol_type = other DNA
ttcatacactcgacaaatatc

SEQ ID NO: 733 - DNA, 21 bp, synthetic construct
  misc_feature 1..21: note = Synthetic
  source 1..21: mol_type = other DNA
tacactcgacaaatatctgtt

SEQ ID NO: 734 - DNA, 21 bp, synthetic construct
  misc_feature 1..21: note = Synthetic
  source 1..21: mol_type = other DNA
acaagcctacggcagagcatg

SEQ ID NO: 735 - DNA, 21 bp, synthetic construct
  misc_feature 1..21: note = Synthetic
  source 1..21: mol_type = other DNA
ctgtagtgtcccacaagccta

SEQ ID NO: 736 - DNA, 21 bp, synthetic construct
  misc_feature 1..21: note = Synthetic
  source 1..21: mol_type = other DNA
gggggagtttctctaatgaag

SEQ ID NO: 737 - DNA, 21 bp, synthetic construct
  misc_feature 1..21: note = Synthetic
  source 1..21: mol_type = other DNA
ttagagaaactccccctgaag

SEQ ID NO: 738 - DNA, 21 bp, synthetic construct
  misc_feature 1..21: note = Synthetic
  source 1..21: mol_type = other DNA
tgccagttgcttttctgtccc

SEQ ID NO: 739 - DNA, 21 bp, synthetic construct
  misc_feature 1..21: note = Synthetic
  source 1..21: mol_type = other DNA
agattaaacagggggacggtg

SEQ ID NO: 740 - DNA, 21 bp, synthetic construct
  misc_feature 1..21: note = Synthetic
  source 1..21: mol_type = other DNA
tctcctggttttgtggtggtg

SEQ ID NO: 741 - DNA, 21 bp, synthetic construct
  misc_feature 1..21: note = Synthetic
  source 1..21: mol_type = other DNA
aggctccagaaaccacatctt

SEQ ID NO: 742 - DNA, 21 bp, synthetic construct
  misc_feature 1..21: note = Synthetic
  source 1..21: mol_type = other DNA
ctcctatgagtttctggctct

SEQ ID NO: 743 - DNA, 21 bp, synthetic construct
  misc_feature 1..21: note = Synthetic
  source 1..21: mol_type = other DNA
cgcctcgctctgctggggacc

SEQ ID NO: 744 - DNA, 21 bp, synthetic construct
  misc_feature 1..21: note = Synthetic
  source 1..21: mol_type = other DNA
ccgcctcgctctgctggggac

SEQ ID NO: 745 - DNA, 21 bp, synthetic construct
  misc_feature 1..21: note = Synthetic
  source 1..21: mol_type = other DNA
ccgctccaggctctatctccc

SEQ ID NO: 746 - DNA, 21 bp, synthetic construct
  misc_feature 1..21: note = Synthetic
  source 1..21: mol_type = other DNA
ggctctatctcccaccagtgc

SEQ ID NO: 747 - DNA, 21 bp, synthetic construct
  misc_feature 1..21: note = Synthetic
  source 1..21: mol_type = other DNA
tgttgggctcagcccgtggga

SEQ ID NO: 748 - DNA, 21 bp, synthetic construct
  misc_feature 1..21: note = Synthetic
  source 1..21: mol_type = other DNA
acgggctgagcccaacaggga

SEQ ID NO: 749 - DNA, 21 bp, synthetic construct
  misc_feature 1..21: note = Synthetic
  source 1..21: mol_type = other DNA
tcagcctgtccctgttgggct

SEQ ID NO: 750 - DNA, 21 bp, synthetic construct
  misc_feature 1..21: note = Synthetic
  source 1..21: mol_type = other DNA
atccacccagtaaggcaccat

SEQ ID NO: 751 - RNA, 21 nt, synthetic construct
  misc_feature 1..21: note = Synthetic
  source 1..21: mol_type = other RNA
ggcagatgttcacgccacgtc

SEQ ID NO: 752 - RNA, 21 nt, synthetic construct
  misc_feature 1..21: note = Synthetic
  source 1..21: mol_type = other RNA
tgagacctcgccggccttgtt

SEQ ID NO: 753 - RNA, 21 nt, synthetic construct
  misc_feature 1..21: note = Synthetic
  source 1..21: mol_type = other RNA
tctgggaggcagaacaggctt

SEQ ID NO: 754 - RNA, 21 nt, synthetic construct
  misc_feature 1..21: note = Synthetic
  source 1..21: mol_type = other RNA
aagcctgttctgcctcccaga

SEQ ID NO: 755 - RNA, 21 nt, synthetic construct
  misc_feature 1..21: note = Synthetic
  source 1..21: mol_type = other RNA
cgaggaaaggaagaaaccaaa

SEQ ID NO: 756 - RNA, 21 nt, synthetic construct
  misc_feature 1..21: note = Synthetic
  source 1..21: mol_type = other RNA
tttcctcgtgaaggataagag

SEQ ID NO: 757 - RNA, 21 nt, synthetic construct
  misc_feature 1..21: note = Synthetic
  source 1..21: mol_type = other RNA
cccgggcctgtttctcttatc

SEQ ID NO: 758 - RNA, 21 nt, synthetic construct
  misc_feature 1..21: note = Synthetic
  source 1..21: mol_type = other RNA
ggaagttttgagtttctctcc

SEQ ID NO: 759 - RNA, 21 nt, synthetic construct
  misc_feature 1..21: note = Synthetic
  source 1..21: mol_type = other RNA
ccgtgacacaatcctcaaaca

SEQ ID NO: 760 - RNA, 21 nt, synthetic construct
  misc_feature 1..21: note = Synthetic
  source 1..21: mol_type = other RNA
tgtttgaggattgtgtcacgg

SEQ ID NO: 761 - RNA, 21 nt, synthetic construct
  misc_feature 1..21: note = Synthetic
  source 1..21: mol_type = other RNA
atgtttgaggattgtgtcacg

SEQ ID NO: 762 - RNA, 21 nt, synthetic construct
  misc_feature 1..21: note = Synthetic
  source 1..21: mol_type = other RNA
tcttccatgtttgaggattgt

SEQ ID NO: 763 - RNA, 21 nt, synthetic construct
  misc_feature 1..21: note = Synthetic
  source 1..21: mol_type = other RNA
ctttcatcttccatgtttgag

SEQ ID NO: 764 - RNA, 21 nt, synthetic construct
  misc_feature 1..21: note = Synthetic
  source 1..21: mol_type = other RNA
acacacaacagcagatggcac

SEQ ID NO: 765 - RNA, 21 nt, synthetic construct
  misc_feature 1..21: note = Synthetic
  source 1..21: mol_type = other RNA
gttggtgccatctgctgttgt

SEQ ID NO: 766 - RNA, 21 nt, synthetic construct
  misc_feature 1..21: note = Synthetic
  source 1..21: mol_type = other RNA
tggcttaaggaaggtacaaac

SEQ ID NO: 767 - RNA, 21 nt, synthetic construct
  misc_feature 1..21: note = Synthetic
  source 1..21: mol_type = other RNA
ttaagccaggaaagggattca

SEQ ID NO: 768 - RNA, 21 nt, synthetic construct
  misc_feature 1..21: note = Synthetic
  source 1..21: mol_type = other RNA
acgccatgaatccctttcctg

SEQ ID NO: 769 - RNA, 21 nt, synthetic construct
  misc_feature 1..21: note = Synthetic
  source 1..21: mol_type = other RNA
gacgccatgaatccctttcct

SEQ ID NO: 770 - RNA, 21 nt, synthetic construct
  misc_feature 1..21: note = Synthetic
  source 1..21: mol_type = other RNA
tggcgtcggaaatgatctggc

SEQ ID NO: 771 - RNA, 21 nt, synthetic construct
  misc_feature 1..21: note = Synthetic
  source 1..21: mol_type = other RNA
gccagatcatttccgacgcca

SEQ ID NO: 772 - RNA, 21 nt, synthetic construct
  misc_feature 1..21: note = Synthetic
  source 1..21: mol_type = other RNA
tggtggcaccgagaccaaact

SEQ ID NO: 773 - RNA, 21 nt, synthetic construct
  misc_feature 1..21: note = Synthetic
  source 1..21: mol_type = other RNA
ccaaatgatgccacttcccag

SEQ ID NO: 774 - RNA, 21 nt, synthetic construct
  misc_feature 1..21: note = Synthetic
  source 1..21: mol_type = other RNA
attcccgtggtctccttgcac

SEQ ID NO: 775 - RNA, 21 nt, synthetic construct
  misc_feature 1..21: note = Synthetic
  source 1..21: mol_type = other RNA
ttcccgtggtctccttgcact

SEQ ID NO: 776 - RNA, 21 nt, synthetic construct
  misc_feature 1..21: note = Synthetic
  source 1..21: mol_type = other RNA
cgtggtctccttgcactttct

SEQ ID NO: 777 - RNA, 21 nt, synthetic construct
  misc_feature 1..21: note = Synthetic
  source 1..21: mol_type = other RNA
gagttgtacactgtgtacatt

SEQ ID NO: 778 - RNA, 21 nt, synthetic construct
  misc_feature 1..21: note = Synthetic
  source 1..21: mol_type = other RNA
atcccaacacacacgacagaa

SEQ ID NO: 779 - RNA, 21 nt, synthetic construct
  misc_feature 1..21: note = Synthetic
  source 1..21: mol_type = other RNA
tggcctgggatcccatcccaa

SEQ ID NO: 780 - RNA, 21 nt, synthetic construct
  misc_feature 1..21: note = Synthetic
  source 1..21: mol_type = other RNA
aggccagggaaagcccgtgtc

SEQ ID NO: 781 - RNA, 21 nt, synthetic construct
  misc_feature 1..21: note = Synthetic
  source 1..21: mol_type = other RNA
ttgacacgggctttccctggc

SEQ ID NO: 782 - RNA, 21 nt, synthetic construct
  misc_feature 1..21: note = Synthetic
  source 1..21: mol_type = other RNA
cggcattcattgacacgggct

SEQ ID NO: 783 - RNA, 21 nt, synthetic construct
  misc_feature 1..21: note = Synthetic
  source 1..21: mol_type = other RNA
ggtcaacctgcccctctctgt

SEQ ID NO: 784 - RNA, 21 nt, synthetic construct
  misc_feature 1..21: note = Synthetic
  source 1..21: mol_type = other RNA
cgatcacggctttgaagtccc

SEQ ID NO: 785 - RNA, 21 nt, synthetic construct
  misc_feature 1..21: note = Synthetic
  source 1..21: mol_type = other RNA
aagccgtgatcgtgaatatcg

SEQ ID NO: 786 - RNA, 21 nt, synthetic construct
  misc_feature 1..21: note = Synthetic
  source 1..21: mol_type = other RNA
cccacctagtgcttccacttc

SEQ ID NO: 787 - RNA, 21 nt, synthetic construct
  misc_feature 1..21: note = Synthetic
  source 1..21: mol_type = other RNA
acttctatgcaaatgcctcca

SEQ ID NO: 788 - RNA, 21 nt, synthetic construct
  misc_feature 1..21: note = Synthetic
  source 1..21: mol_type = other RNA
cttctatgcaaatgcctccaa

SEQ ID NO: 789 - RNA, 21 nt, synthetic construct
  misc_feature 1..21: note = Synthetic
  source 1..21: mol_type = other RNA
cttccccaatcttgtcgttga

SEQ ID NO: 790 - RNA, 21 nt, synthetic construct
  misc_feature 1..21: note = Synthetic
  source 1..21: mol_type = other RNA
gtctggatcgtttgacgggac

SEQ ID NO: 791 - RNA, 21 nt, synthetic construct
  misc_feature 1..21: note = Synthetic
  source 1..21: mol_type = other RNA
gaaagaacctgaagtcccgtc

SEQ ID NO: 792 - RNA, 21 nt, synthetic construct
  misc_feature 1..21: note = Synthetic
  source 1..21: mol_type = other RNA
ggttctttctgaaatcgccgt

SEQ ID NO: 793 - RNA, 21 nt, synthetic construct
  misc_feature 1..21: note = Synthetic
  source 1..21: mol_type = other RNA
gagagacagtgacagcctccg

SEQ ID NO: 794 - RNA, 21 nt, synthetic construct
  misc_feature 1..21: note = Synthetic
  source 1..21: mol_type = other RNA
cgcgggagtctgacggaggct

SEQ ID NO: 795 - RNA, 21 nt, synthetic construct
  misc_feature 1..21: note = Synthetic
  source 1..21: mol_type = other RNA
tcagactcccgcgtgaagatg

SEQ ID NO: 796 - RNA, 21 nt, synthetic construct
  misc_feature 1..21: note = Synthetic
  source 1..21: mol_type = other RNA
ttgtgacatcttcacgcggga

SEQ ID NO: 797 - RNA, 21 nt, synthetic construct
  misc_feature 1..21: note = Synthetic
  source 1..21: mol_type = other RNA
gcgtgaagatgtcacaaggga

SEQ ID NO: 798 - RNA, 21 nt, synthetic construct
  misc_feature 1..21: note = Synthetic
  source 1..21: mol_type = other RNA
tggggacaattgccaatccct

SEQ ID NO: 799 - RNA, 21 nt, synthetic construct
  misc_feature 1..21: note = Synthetic
  source 1..21: mol_type = other RNA
cagggacaaaacactgtgtcc

SEQ ID NO: 800 - RNA, 21 nt, synthetic construct
  misc_feature 1..21: note = Synthetic
  source 1..21: mol_type = other RNA
tgcactgggggggacacagtg

SEQ ID NO: 801 - RNA, 21 nt, synthetic construct
  misc_feature 1..21: note = Synthetic
  source 1..21: mol_type = other RNA
ctgcactgggggggacacagt

SEQ ID NO: 802 - RNA, 21 nt, synthetic construct
  misc_feature 1..21: note = Synthetic
  source 1..21: mol_type = other RNA
ccccagtgcagggaaccgtga

SEQ ID NO: 803 - RNA, 21 nt, synthetic construct
  misc_feature 1..21: note = Synthetic
  source 1..21: mol_type = other RNA
aaaccagaaaggcttatcacg

SEQ ID NO: 804 - RNA, 21 nt, synthetic construct
  misc_feature 1..21: note = Synthetic
  source 1..21: mol_type = other RNA
gagcacgtaaatgcgtccctg

SEQ ID NO: 805 - RNA, 21 nt, synthetic construct
  misc_feature 1..21: note = Synthetic
  source 1..21: mol_type = other RNA
cactatctgtacagggacgca

SEQ ID NO: 806 - RNA, 21 nt, synthetic construct
  misc_feature 1..21: note = Synthetic
  source 1..21: mol_type = other RNA
tgtacagatagtggggatttt

SEQ ID NO: 807 - RNA, 21 nt, synthetic construct
  misc_feature 1..21: note = Synthetic
  source 1..21: mol_type = other RNA
gtgactattctcggggccctg

SEQ ID NO: 808 - RNA, 21 nt, synthetic construct
  misc_feature 1..21: note = Synthetic
  source 1..21: mol_type = other RNA
gaggcaataaccccctacaca

SEQ ID NO: 809 - RNA, 21 nt, synthetic construct
  misc_feature 1..21: note = Synthetic
  source 1..21: mol_type = other RNA
gttcgtgcaaataatctttgt

SEQ ID NO: 810 - RNA, 21 nt, synthetic construct
  misc_feature 1..21: note = Synthetic
  source 1..21: mol_type = other RNA
aaaaagcgttgcacacagtcc

SEQ ID NO: 811 - RNA, 21 nt, synthetic construct
  misc_feature 1..21: note = Synthetic
  source 1..21: mol_type = other RNA
cgttgtatgtatgagtggctt

SEQ ID NO: 812 - RNA, 21 nt, synthetic construct
  misc_feature 1..21: note = Synthetic
  source 1..21: mol_type = other RNA
ggctacaaaaaccttctatac

SEQ ID NO: 813 - RNA, 21 nt, synthetic construct
  misc_feature 1..21: note = Synthetic
  source 1..21: mol_type = other RNA
tttaagaaatttaattgatca

SEQ ID NO: 814 - RNA, 21 nt, synthetic construct
  misc_feature 1..21: note = Synthetic
  source 1..21: mol_type = other RNA
agaactccgggcaagatgcaa

SEQ ID NO: 815 - RNA, 21 nt, synthetic construct
  misc_feature 1..21: note = Synthetic
  source 1..21: mol_type = other RNA
ggcaagatgcaatctccgtgg

SEQ ID NO: 816 - RNA, 21 nt, synthetic construct
  misc_feature 1..21: note = Synthetic
  source 1..21: mol_type = other RNA
actcagagaagcgacagcaga

SEQ ID NO: 817 - RNA, 21 nt, synthetic construct
  misc_feature 1..21: note = Synthetic
  source 1..21: mol_type = other RNA
ctgctcatccattcatacact

SEQ ID NO: 818 - RNA, 21 nt, synthetic construct
  misc_feature 1..21: note = Synthetic
  source 1..21: mol_type = other RNA
ttcatacactcgacaaatatc

SEQ ID NO: 819 - RNA, 21 nt, synthetic construct
  misc_feature 1..21: note = Synthetic
  source 1..21: mol_type = other RNA
tacactcgacaaatatctgtt

SEQ ID NO: 820 - RNA, 21 nt, synthetic construct
  misc_feature 1..21: note = Synthetic
  source 1..21: mol_type = other RNA
acaagcctacggcagagcatg

SEQ ID NO: 821 - RNA, 21 nt, synthetic construct
  misc_feature 1..21: note = Synthetic
  source 1..21: mol_type = other RNA
ctgtagtgtcccacaagccta

SEQ ID NO: 822 - RNA, 21 nt, synthetic construct
  misc_feature 1..21: note = Synthetic
  source 1..21: mol_type = other RNA
gggggagtttctctaatgaag

SEQ ID NO: 823 - RNA, 21 nt, synthetic construct
  misc_feature 1..21: note = Synthetic
  source 1..21: mol_type = other RNA
ttagagaaactccccctgaag

SEQ ID NO: 824 - RNA, 21 nt, synthetic construct
  misc_feature 1..21: note = Synthetic
  source 1..21: mol_type = other RNA
tgccagttgcttttctgtccc

SEQ ID NO: 825 - RNA, 21 nt, synthetic construct
  misc_feature 1..21: note = Synthetic
  source 1..21: mol_type = other RNA
agattaaacagggggacggtg

SEQ ID NO: 826 - RNA, 21 nt, synthetic construct
  misc_feature 1..21: note = Synthetic
  source 1..21: mol_type = other RNA
tctcctggttttgtggtggtg

SEQ ID NO: 827 - RNA, 21 nt, synthetic construct
  misc_feature 1..21: note = Synthetic
  source 1..21: mol_type = other RNA
aggctccagaaaccacatctt

SEQ ID NO: 828 - RNA, 21 nt, synthetic construct
  misc_feature 1..21: note = Synthetic
  source 1..21: mol_type = other RNA
ctcctatgagtttctggctct

SEQ ID NO: 829 - RNA, 21 nt, synthetic construct
  misc_feature 1..21: note = Synthetic
  source 1..21: mol_type = other RNA
cgcctcgctctgctggggacc

SEQ ID NO: 830 - RNA, 21 nt, synthetic construct
  misc_feature 1..21: note = Synthetic
  source 1..21: mol_type = other RNA
ccgcctcgctctgctggggac

SEQ ID NO: 831 - RNA, 21 nt, synthetic construct
  misc_feature 1..21: note = Synthetic
  source 1..21: mol_type = other RNA
ccgctccaggctctatctccc

SEQ ID NO: 832 - RNA, 21 nt, synthetic construct
  misc_feature 1..21: note = Synthetic
  source 1..21: mol_type = other RNA
ggctctatctcccaccagtgc

SEQ ID NO: 833 - RNA, 21 nt, synthetic construct
  misc_feature 1..21: note = Synthetic
  source 1..21: mol_type = other RNA
tgttgggctcagcccgtggga

SEQ ID NO: 834 - RNA, 21 nt, synthetic construct
  misc_feature 1..21: note = Synthetic
  source 1..21: mol_type = other RNA
acgggctgagcccaacaggga

SEQ ID NO: 835 - RNA, 21 nt, synthetic construct
  misc_feature 1..21: note = Synthetic
  source 1..21: mol_type = other RNA
tcagcctgtccctgttgggct

SEQ ID NO: 836 - RNA, 21 nt, synthetic construct
  misc_feature 1..21: note = Synthetic
  source 1..21: mol_type = other RNA
atccacccagtaaggcaccat

SEQ ID NO: 837 - DNA, 21 bp, Homo sapiens
  source 1..21: mol_type = genomic DNA
taaaacaaagctctggcaggc

SEQ ID NO: 838 - DNA, 21 bp, Homo sapiens
  source 1..21: mol_type = genomic DNA
caagccttgctagacagccag

SEQ ID NO: 839 - DNA, 21 bp, Homo sapiens
  source 1..21: mol_type = genomic DNA
gagaactgccattgtcgtctt

SEQ ID NO: 840 - DNA, 21 bp, Homo sapiens
  source 1..21: mol_type = genomic DNA
tccgcccacctagtgcttcca

SEQ ID NO: 841 - DNA, 21 bp, Homo sapiens
  source 1..21: mol_type = genomic DNA
caaatgcctccaagccattca

SEQ ID NO: 842 - DNA, 21 bp, Homo sapiens
  source 1..21: mol_type = genomic DNA
tgtttaaaacatgcacggtga

SEQ ID NO: 843 - DNA, 21 bp, Homo sapiens
  source 1..21: mol_type = genomic DNA
gttgtatttctgaaatagggt

SEQ ID NO: 844 - DNA, 21 bp, Homo sapiens
  source 1..21: mol_type = genomic DNA
acggttccctgcactgggggg

SEQ ID NO: 845 - DNA, 21 bp, Homo sapiens
  source 1..21: mol_type = genomic DNA
tgtacagggacgcatttacgt

SEQ ID NO: 846 - DNA, 21 bp, Homo sapiens
  source 1..21: mol_type = genomic DNA
tttgcactttgtatattggtt

SEQ ID NO: 847 - DNA, 21 bp, Homo sapiens
  source 1..21: mol_type = genomic DNA
ttggttgaaactgttatcact

SEQ ID NO: 848 - DNA, 21 bp, Homo sapiens
  source 1..21: mol_type = genomic DNA
agtgataacagtttcaaccaa

SEQ ID NO: 849 - DNA, 21 bp, Homo sapiens
  source 1..21: mol_type = genomic DNA
taagtgataacagtttcaacc

SEQ ID NO: 850 - DNA, 21 bp, Homo sapiens
  source 1..21: mol_type = genomic DNA
tataagtgataacagtttcaa

SEQ ID NO: 851 - DNA, 21 bp, Homo sapiens
  source 1..21: mol_type = genomic DNA
tatataagtgataacagtttc

SEQ ID NO: 852 - DNA, 21 bp, Homo sapiens
  source 1..21: mol_type = genomic DNA
tatatataagtgataacagtt

SEQ ID NO: 853 - DNA, 21 bp, Homo sapiens
  source 1..21: mol_type = genomic DNA
tacaaagattatttgcacgaa

SEQ ID NO: 854 - DNA, 21 bp, Homo sapiens
  source 1..21: mol_type = genomic DNA
tatgagtggcttctgggagat

SEQ ID NO: 855 - DNA, 21 bp, Homo sapiens
  source 1..21: mol_type = genomic DNA
agtggcttctgggagatgggt

SEQ ID NO: 856 - DNA, 21 bp, Homo sapiens
  source 1..21: mol_type = genomic DNA
cagtggtttaaaaagtgacac

SEQ ID NO: 857 - DNA, 21 bp, Homo sapiens
  source 1..21: mol_type = genomic DNA
gaaggtttttgtagcctgaat

SEQ ID NO: 858 - DNA, 21 bp, Homo sapiens
  source 1..21: mol_type = genomic DNA
aatggatgagcaggggacttg

SEQ ID NO: 859 - DNA, 21 bp, Homo sapiens
  source 1..21: mol_type = genomic DNA
tgttgagtgctaagtgcgaac

SEQ ID NO: 860 - DNA, 21 bp, Homo sapiens
  source 1..21: mol_type = genomic DNA
ccctgtagtgtcccacaagcc

SEQ ID NO: 861 - DNA, 21 bp, Homo sapiens
  source 1..21: mol_type = genomic DNA
tcccctgtagtgtcccacaag

SEQ ID NO: 862 - DNA, 21 bp, Homo sapiens
  source 1..21: mol_type = genomic DNA
gggacagaaaagcaactggca

SEQ ID NO: 863 - DNA, 21 bp, Homo sapiens
  source 1..21: mol_type = genomic DNA
gtgcagtcacctgccagcata

SEQ ID NO: 864 - DNA, 21 bp, Homo sapiens
  source 1..21: mol_type = genomic DNA
ctggcaggtgactgcaccata

SEQ ID NO: 865 - DNA, 21 bp, Homo sapiens
  source 1..21: mol_type = genomic DNA
agtttctggctctcaccagct

SEQ ID NO: 866 - RNA, 21 nt, synthetic construct
  misc_feature 1..21: note = Synthetic
  source 1..21: mol_type = other RNA
taaaacaaagctctggcaggc

SEQ ID NO: 867 - RNA, 21 nt, synthetic construct
  misc_feature 1..21: note = Synthetic
  source 1..21: mol_type = other RNA
caagccttgctagacagccag

SEQ ID NO: 868 - RNA, 21 nt, synthetic construct
  misc_feature 1..21: note = Synthetic
  source 1..21: mol_type = other RNA
gagaactgccattgtcgtctt

SEQ ID NO: 869 - RNA, 21 nt, synthetic construct
  misc_feature 1..21: note = Synthetic
  source 1..21: mol_type = other RNA
tccgcccacctagtgcttcca

SEQ ID NO: 870 - RNA, 21 nt, synthetic construct
  misc_feature 1..21: note = Synthetic
  source 1..21: mol_type = other RNA
caaatgcctccaagccattca

SEQ ID NO: 871 - RNA, 21 nt, synthetic construct
  misc_feature 1..21: note = Synthetic
  source 1..21: mol_type = other RNA
tgtttaaaacatgcacggtga

SEQ ID NO: 872 - RNA, 21 nt, synthetic construct
  misc_feature 1..21: note = Synthetic
  source 1..21: mol_type = other RNA
gttgtatttctgaaatagggt

SEQ ID NO: 873 - RNA, 21 nt, synthetic construct
  misc_feature 1..21: note = Synthetic
  source 1..21: mol_type = other RNA
acggttccctgcactgggggg

SEQ ID NO: 874 - RNA, 21 nt, synthetic construct
  misc_feature 1..21: note = Synthetic
  source 1..21: mol_type = other RNA
tgtacagggacgcatttacgt

SEQ ID NO: 875 - RNA, 21 nt, synthetic construct
  misc_feature 1..21: note = Synthetic
  source 1..21: mol_type = other RNA
tttgcactttgtatattggtt

SEQ ID NO: 876 - RNA, 21 nt, synthetic construct
  misc_feature 1..21: note = Synthetic
  source 1..21: mol_type = other RNA
ttggttgaaactgttatcact

SEQ ID NO: 877 - RNA, 21 nt, synthetic construct
  misc_feature 1..21: note = Synthetic
  source 1..21: mol_type = other RNA
agtgataacagtttcaaccaa

SEQ ID NO: 878 - RNA, 21 nt, synthetic construct
  misc_feature 1..21: note = Synthetic
  source 1..21: mol_type = other RNA
taagtgataacagtttcaacc

SEQ ID NO: 879 - RNA, 21 nt, synthetic construct
  misc_feature 1..21: note = Synthetic
  source 1..21: mol_type = other RNA
tataagtgataacagtttcaa

SEQ ID NO: 880 - RNA, 21 nt, synthetic construct
  misc_feature 1..21: note = Synthetic
  source 1..21: mol_type = other RNA
tatataagtgataacagtttc

SEQ ID NO: 881 - RNA, 21 nt, synthetic construct
  misc_feature 1..21: note = Synthetic
  source 1..21: mol_type = other RNA
tatatataagtgataacagtt

SEQ ID NO: 882 - RNA, 21 nt, synthetic construct
  misc_feature 1..21: note = Synthetic
  source 1..21: mol_type = other RNA
tacaaagattatttgcacgaa

SEQ ID NO: 883 - RNA, 21 nt, synthetic construct
  misc_feature 1..21: note = Synthetic
  source 1..21: mol_type = other RNA
tatgagtggcttctgggagat

SEQ ID NO: 884 - RNA, 21 nt, synthetic construct
  misc_feature 1..21: note = Synthetic
  source 1..21: mol_type = other RNA
agtggcttctgggagatgggt

SEQ ID NO: 885 - RNA, 21 nt, synthetic construct
  misc_feature 1..21: note = Synthetic
  source 1..21: mol_type = other RNA
cagtggtttaaaaagtgacac

SEQ ID NO: 886 - RNA, 21 nt, synthetic construct
  misc_feature 1..21: note = Synthetic
  source 1..21: mol_type = other RNA
gaaggtttttgtagcctgaat

SEQ ID NO: 887 - RNA, 21 nt, synthetic construct
  misc_feature 1..21: note = Synthetic
  source 1..21: mol_type = other RNA
aatggatgagcaggggacttg

SEQ ID NO: 888 - RNA, 21 nt, synthetic construct
  misc_feature 1..21: note = Synthetic
  source 1..21: mol_type = other RNA
tgttgagtgctaagtgcgaac

SEQ ID NO: 889 - RNA, 21 nt, synthetic construct
  misc_feature 1..21: note = Synthetic
  source 1..21: mol_type = other RNA
ccctgtagtgtcccacaagcc

SEQ ID NO: 890 - RNA, 21 nt, synthetic construct
  misc_feature 1..21: note = Synthetic
  source 1..21: mol_type = other RNA
tcccctgtagtgtcccacaag

SEQ ID NO: 891 - RNA, 21 nt, synthetic construct
  misc_feature 1..21: note = Synthetic
  source 1..21: mol_type = other RNA
gggacagaaaagcaactggca

SEQ ID NO: 892 - RNA, 21 nt, synthetic construct
  misc_feature 1..21: note = Synthetic
  source 1..21: mol_type = other RNA
gtgcagtcacctgccagcata

SEQ ID NO: 893 - RNA, 21 nt, synthetic construct
  misc_feature 1..21: note = Synthetic
  source 1..21: mol_type = other RNA
ctggcaggtgactgcaccata

SEQ ID NO: 894 - RNA, 21 nt, synthetic construct
  misc_feature 1..21: note = Synthetic
  source 1..21: mol_type = other RNA
agtttctggctctcaccagct

SEQ ID NO: 895 - RNA, 4254 nt, synthetic construct
  misc_feature 1..4254: note = Synthetic
  source 1..4254: mol_type = other RNA
aggaaataagagagaaaagaagagtaagaagaaatataagagccaccatgacacagttcgagggctttaccaacctgtatcaggtgagcaagacactgcggtttgagctgatcccacagggcaagaccctgaagcacatccaggagcagggcttcatcgaggaggacaaggcccgcaatgatcactacaaggagctgaagcccatcatcgatcggatctacaagacctatgccgaccagtgcctgcagctggtgcagctggattgggagaacctgagcgccgccatcgactcctatagaaaggagaaaaccgaggagacaaggaacgccctgatcgaggagcaggccacatatcgcaatgccatccacgactacttcatcggccggacagacaacctgaccgatgccatcaataagagacacgccgagatctacaagggcctgttcaaggccgagctgtttaatggcaaggtgctgaagcagctgggcaccgtgaccacaaccgagcacgagaacgccctgctgcggagcttcgacaagtttacaacctacttctccggcttttatgagaacaggaagaacgtgttcagcgccgaggatatcagcacagccatcccacaccgcatcgtgcaggacaacttccccaagtttaaggagaattgtcacatcttcacacgcctgatcaccgccgtgcccagcctgcgggagcactttgagaacgtgaagaaggccatcggcatcttcgtgagcacctccatcgaggaggtgttttccttccctttttataaccagctgctgacacagacccagatcgacctgtataaccagctgctgggaggaatctctcgggaggcaggcaccgagaagatcaagggcctgaacgaggtgctgaatctggccatccagaagaatgatgagacagcccacatcatcgcctccctgccacacagattcatccccctgtttaagcagatcctgtccgataggaacaccctgtctttcatcctggaggagtttaagagcgacgaggaagtgatccagtccttctgcaagtacaagacactgctgagaaacgagaacgtgctggagacagccgaggccctgtttaacgagctgaacagcatcgacctgacacacatcttcatcagccacaagaagctggagacaatcagcagcgccctgtgcgaccactgggatacactgaggaatgccctgtatgagcggagaatctccgagctgacaggcaagatcaccaagtctgccaaggagaaggtgcagcgcagcctgaagcacgaggatatcaacctgcaggagatcatctctgccgcaggcaaggagctgagcgaggccttcaagcagaaaaccagcgagatcctgtcccacgcacacgccgccctggatcagccactgcctacaaccctgaagaagcaggaggagaaggagatcctgaagtctcagctggacagcctgctgggcctgtaccacctgctggactggtttgccgtggatgagtccaacgaggtggaccccgagttctctgcccggctgaccggcatcaagctggagatggagccttctctgagcttctacaacaaggccagaaattatgccaccaagaagccctactccgtggagaagttcaagctgaactttcagcggcctacactggcctctggctgggacgtgaataaggagaagaacaatggcgccatcctgtttgtgaagaacggcctgtactatctgggcatcatgccaaagcagaagggcaggtataaggccctgagcttcgagcccacagagaaaaccagcgagggctttgataagatgtactatgactacttccctgatgccgccaagatgatcccaaagtgcagcacccagctgaaggccgtgacagcccactttcagacccacacaacccccatcctgctgtccaacaatttcatcgagcctctggagatcacaaaggagatctacgacctgaacaatcctgagaaggagccaaagaagtttcagacagcctacgccaagaaaaccggcgaccagaagggctacagagaggccctgtgcaagtggatcgacttcacaagggattttctgtccaagtataccaagacaacctctatcgatctgtctagcctgcggccatcctctcagtataaggacctgggcgagtactatgccgagctgaatcccctgctgtaccacatcagcttccagagaatcgccgagaaggagatcatggatgccgtggagacaggcaagctgtacctgttccagatctataacaaggactttgccaagggccaccacggcaagcctaatctgcacacactgtattggaccggcctgttttctccagagaacctggccaagacaagcatcaagctgaatggccaggccgagctgttctaccgccctaagtccaggatgaagaggatggcagcccggctgggagagaagatgctgaacaagaagctgaaggatcagaaaaccccaatccccgacaccctgtaccaggagctgtacgactatgtgaatcacagactgtcccacgacctgtctgatgaggccagggccctgctgcccaacgtgatcaccaaggaggtgtctcacgagatcatcaaggataggcgctttaccagcgacaagttcttgttccacgtgcctatcacactgaactatcaggccgccaattccccatctaagttcaaccagagggtgaatgcctacctgaaggagcaccccgagacacctatcatcggcatcgatcggggcgagagaaacctgatctatatcacagtgatcgactccaccggcaagatcctggagcagcggagcctgaacaccatccagcagtttgattaccagaagaagctggacaacagggagaaggagagggtggcagcaaggcaggcctggtctgtggtgggcacaatcaaggatctgaagcagggctatctgagccaggtcatccacgagatcgtggacctgatgatccactaccaggccgtggtggtgctggagaacctgaatttcggctttaagagcaagaggaccggcatcgccgagaaggccgtgtaccagcagttcgagaagatgctgatcgataagctgaattgcctggtgctgaaggactatccagcagagaaagtgggaggcgtgctgaacccataccagctgacagaccagttcacctcctttgccaagatgggcacccagtctggcttcctgttttacgtgcctgccccatatacatctaagatcgatcccctgaccggcttcgtggaccccttcgtgtggaaaaccatcaagaatcacgagagccgcaagcacttcctggagggcttcgactttctgcactacgacgtgaaaaccggcgacttcatcctgcactttaagatgaacagaaatctgtccttccagaggggcctgcccggctttatgcctgcatgggatatcgtgttcgagaagaacgagacacagtttgacgccaagggcacccctttcatcgccggcaagagaatcgtgccagtgatcgagaatcacagattcaccggcagataccgggacctgtatcctgccaacgagctgatcgccctgctggaggagaagggcatcgtgttcagggatggctccaacatcctgccaaagctgctggagaatgacgattctcacgccatcgacaccatggtggccctgatccgcagcgtgctgcagatgcggaactccaatgccgccacaggcgaggactatatcaacagccccgtgcgcgatctgaatggcgtgtgcttcgactcccggtttcagaacccagagtggcccatggacgccgatgccaatggcgcctaccacatcgccctgaagggccagctgctgctgaatcacctgaaggagagcaaggatctgaagctgcagaacggcatctccaatcaggactggctggcctacatccaggagctgcgcaacggtcgtagcagtgatgatgaagcaaccgcagatagccagcatgcagcaccgcccaagaagaagaggaaagtctaatagtgaatggtttatattgcggccgcttaattaagctgccttctgcggggcttgccttctggccatgcccttcttctctcccttgcacctgtacctcttggtctttgaataaagcctgagtaggaagtctagaaaaaaaaaaaaaaaaaaaaaaaaaaaaaaaaaaaaaaaaaaaaaaaaaaaaaaaaaaaaaaaaaaaaaaaaaaaaaaa

SEQ ID NO: 896 - RNA, 4254 nt, synthetic construct; identical to SEQ ID NO: 895
  misc_feature 1..4254: note = Synthetic
  source 1..4254: mol_type = other RNA

SEQ ID NO: 897 - RNA, 4248 nt, synthetic construct
  misc_feature 1..4248: note = Synthetic
  source 1..4248: mol_type = other RNA
aggaaataagagagaaaagaagagtaagaagaaatataagagccaccatgacacagttcgagggctttaccaacctgtatcaggtgagcaagacactgcggtttgagctgatcccacagggcaagaccctgaagcacatccaggagcagggcttcatcgaggaggacaaggcccgcaatgatcactacaaggagctgaagcccatcatcgatcggatctacaagacctatgccgaccagtgcctgcagctggtgcagctggattgggagaacctgagcgccgccatcgactcctatagaaaggagaaaaccgaggagacaaggaacgccctgatcgaggagcaggccacatatcgcaatgccatccacgactacttcatcggccggacagacaacctgaccgatgccatcaataagagacacgccgagatctacaagggcctgttcaaggccgagctgtttaatggcaaggtgctgaagcagctgggcaccgtgaccacaaccgagcacgagaacgccctgctgcggagcttcgacaagtttacaacctacttctccggcttttatgagaacaggaagaacgtgttcagcgccgaggatatcagcacagccatcccacaccgcatcgtgcaggacaacttccccaagtttaaggagaattgtcacatcttcacacgcctgatcaccgccgtgcccagcctgcgggagcactttgagaacgtgaagaaggccatcggcatcttcgtgagcacctccatcgaggaggtgttttccttccctttttataaccagctgctgacacagacccagatcgacctgtataaccagctgctgggaggaatctctcgggaggcaggcaccgagaagatcaagggcctgaacgaggtgctgaatctggccatccagaagaatgatgagacagcccacatcatcgcctccctgccacacagattcatccccctgtttaagcagatcctgtccgataggaacaccctgtctttcatcctggaggagtttaagagcgacgaggaagtgatccagtccttctgcaagtacaagacactgctgagaaacgagaacgtgctggagacagccgaggccctgtttaacgagctgaacagcatcgacctgacacacatcttcatcagccacaagaagctggagacaatcagcagcgccctgtgcgaccactgggatacactgaggaatgccctgtatgagcggagaatctccgagctgacaggcaagatcaccaagtctgccaaggagaaggtgcagcgcagcctgaagcacgaggatatcaacctgcaggagatcatctctgccgcaggcaaggagctgagcgaggccttcaagcagaaaaccagcgagatcctgtcccacgcacacgccgccctggatcagccactgcctacaaccctgaagaagcaggaggagaaggagatcctgaagtctcagctggacagcctgctgggcctgtaccacctgctggactggtttgccgtggatgagtccaacgaggtggaccccgagttctctgcccggctgaccggcatcaagctggagatggagccttctctgagcttctacaacaaggccagaaattatgccaccaagaagccctactccgtggagaagttcaagctgaactttcagcggcctacactggcccgtggctgggacgtgaataaggagaagaacaatggcgccatcctgtttgtgaagaacggcctgtactatctgggcatcatgccaaagcagaagggcaggtataaggccctgagcttcgagcccacagagaaaaccagcgagggctttgataagatgtactatgactacttccctgatgccgccaagatgatcccaaggtgcagcacccagctgaaggccgtgacagcccactttcagacccacacaacccccatcctgctgtccaacaatttcatcgagcctctggagatcacaaaggagatctacgacctgaacaatcctgagaaggagccaaagaagtttcagacagcctacgccaagaaaaccggcgaccagaagggctacagagaggccctgtgcaagtggatcgacttcacaagggattttctgtccaagtataccaagacaacctctatcgatctgtctagcctgcggccatcctctcagtataaggacctgggcgagtactatgccgagctgaatcccctgctgtaccacatcagcttccagagaatcgccgagaaggagatcatggatgccgtggagacaggcaagctgtacctgttccagatctataacaaggactttgccaagggccaccacggcaagcctaatctgcacacactgtattggaccggcctgttttctccagagaacctggccaagacaagcatcaagctgaatggccaggccgagctgttctaccgccctaagtccaggatgaagaggatggcagcccggctgggagagaagatgctgaacaagaagctgaaggatcagaaaaccccaatccccgacaccctgtaccaggagctgtacgactatgtgaatcacagactgtcccacgacctgtctgatgaggccagggccctgctgcccaacgtgatcaccaaggaggtgtctcacgagatcatcaaggataggcgctttaccagcgacaagttcttgttccacgtgcctatcacactgaactatcaggccgccaattccccatctaagttcaaccagagggtgaatgcctacctgaaggagcaccccgagacacctatcatcggcatcgatcggggcgagagaaacctgatctatatcacagtgatcgactccaccggcaagatcctggagcagcggagcctgaacaccatccagcagtttgattaccagaagaagctggacaacagggagaaggagagggtggcagcaaggcaggcctggtctgtggtgggcacaatcaaggatctgaagcagggctatctgagccaggtcatccacgagatcgtggacctgatgatccactaccaggccgtggtggtgctggagaacctgaatttcggctttaagagcaagaggaccggcatcgccgagaaggccgtgtaccagcagttcgagaagatgctgatcgataagctgaattgcctggtgctgaaggactatccagcagagaaagtgggaggcgtgctgaacccataccagctgacagaccagttcacctcctttgccaagatgggcacccagtctggcttcctgttttacgtgcctgccccatatacatctaagatcgatcccctgaccggcttcgtggaccccttcgtgtggaaaaccatcaagaatcacgagagccgcaagcacttcctggagggcttcgactttctgcactacgacgtgaaaaccggcgacttcatcctgcactttaagatgaacagaaatctgtccttccagaggggcctgcccggctttatgcctgcatgggatatcgtgttcgagaagaacgagacacagtttgacgccaagggcacccctttcatcgccggcaagagaatcgtgccagtgatcgagaatcacagattcaccggcagataccgggacctgtatcctgccaacgagctgatcgccctgctggaggagaagggcatcgtgttcagggatggctccaacatcctgccaaagctgctggagaatgacgattctcacgccatcgacaccatggtggccctgatccgcagcgtgctgcagatgcggaactccaatgccgccacaggcgaggactatatcaacagccccgtgcgcgatctgaatggcgtgtgcttcgactcccggtttcagaacccagagtggcccatggacgccgatgccaatggcgcctaccacatcgccctgaagggccagctgctgctgaatcacctgaaggagagcaaggatctgaagctgcagaacggcatctccaatcaggactggctggcctacatccaggagctgcgcaacggcggatcccctgctgctaaacgtgttaagcttgatgggggtagcccggcagccaagagagtcaaactcgactagatggtttatattgcggccgcttaattaagctgccttctgcggggcttgccttctggccatgcccttcttctctcccttgcacctgtacctcttggtctttgaataaagcctgagtaggaagtctagaaaaaaaaaaaaaaaaaaaaaaaaaaaaaaaaaaaaaaaaaaaaaaaaaaaaaaaaaaaaaaaaaaaaaaaaaaaaaaa

SEQ ID NO: 898 - RNA, 4248 nt, synthetic construct
  misc_feature 1..4248: note = Synthetic
  source 1..4248: mol_type = other RNA
aggaaataagagagaaaagaagagtaagaagaaatataagagccaccatgacacagttcgagggctttaccaacctgtatcaggtgagcaagacactgcggtttgagctgatcccacagggcaagaccctgaagcacatccaggagcagggcttcatcgaggaggacaaggcccgcaatgatcactacaaggagctgaagcccatcatcgatcggatctacaagacctatgccgaccagtgcctgcagctggtgcagctggattgggagaacctgagcgccgccatcgactcctatagaaaggagaaaaccgaggagacaaggaacgccctgatcgaggagcaggccacatatcgcaatgccatccacgactacttcatcggccggacagacaacctgaccgatgccatcaataagagacacgccgagatctacaagggcctgttcaaggccgagctgtttaatggcaaggtgctgaagcagctgggcaccgtgaccacaaccgagcacgagaacgccctgctgcggagcttcgacaagtttacaacctacttctccggcttttatgagaacaggaagaacgtgttcagcgccgaggatatcagcacagccatcccacaccgcatcgtgcaggacaacttccccaagtttaaggagaattgtcacatcttcacacgcctgatcaccgccgtgcccagcctgcgggagcactttgagaacgtgaagaaggccatcggcatcttcgtgagcacctccatcgaggaggtgttttccttccctttttataaccagctgctgacacagacccagatcgacctgtataaccagctgctgggaggaatctctcgggaggcaggcaccgagaagatcaagggcctgaacgaggtgctgaatctggccatccagaagaatgatgagacagcccacatcatcgcctccctgccacacagattcatccccctgtttaagcagatcctgtccgataggaacaccctgtctttcatcctggaggagtttaagagcgacgaggaagtgatccagtccttctgcaagtacaagacactgctgagaaacgagaacgtgctggagacagccgaggccctgtttaacgagctgaacagcatcgacctgacacacatcttcatcagccacaagaagctggagacaatcagcagcgccctgtgcgaccactgggatacactgaggaatgccctgtatgagcggagaatctccgagctgacaggcaagatcaccaagtctgccaaggagaaggtgcagcgcagcctgaagcacgaggatatcaacctgcaggagatcatctctgccgcaggcaaggagctgagcgaggccttcaagcagaaaaccagcgagatcctgtcccacgcacacgccgccctggatcagccactgcctacaaccctgaagaagcaggaggagaaggagatcctgaagtctcagctggacagcctgctgggcctgtaccacctgctggactggtttgccgtggatgagtccaacgaggtggaccccgagttctctgcccggctgaccggcatcaagctggagatggagccttctctgagcttctacaacaaggccagaaattatgccaccaagaagccctactccgtggagaagttcaagctgaactttcagcggcctacactggcccgtggctgggacgtgaatgtggagaagaaccgtggcgccatcctgtttgtgaagaacggcctgtactatctgggcatcatgccaaagcagaagggcaggtataaggccctgagcttcgagcccacagagaaaaccagcgagggctttgataagatgtactatgactacttccctgatgccgccaagatgatcccaaagtgcagcacccagctgaaggccgtgacagcccactttcagacccacacaacccccatcctgctgtccaacaatttcatcgagcctctggagatcacaaaggagatctacgacctgaacaatcctgagaaggagccaaagaagtttcagacagcctacgccaagaaaaccggcgaccagaagggctacagagaggccctgtgcaagtggatcgacttcacaagggattttctgtccaagtataccaagacaacctctatcgatctgtctagcctgcggccatcctctcagtataaggacctgggcgagtactatgccgagctgaatcccctgctgtaccacatcagcttccagagaatcgccgagaaggagatcatggatgccgtggagacaggcaagctgtacctgttccagatctataacaaggactttgccaagggccaccacggcaagcctaatctgcacacactgtattggaccggcctgttttctccagagaacctggccaagacaagcatcaagctgaatggccaggccgagctgttctaccgccctaagtccaggatgaagaggatggcagcccggctgggagagaagatgctgaacaagaagctgaaggatcagaaaaccccaatccccgacaccctgtaccaggagctgtacgactatgtgaatcacagactgtcccacgacctgtctgatgaggccagggccctgctgcccaacgtgatcaccaaggaggtgtctcacgagatcatcaaggataggcgctttaccagcgacaagttcttgttccacgtgcctatcacactgaactatcaggccgccaattccccatctaagttcaaccagagggtgaatgcctacctgaaggagcaccccgagacacctatcatcggcatcgatcggggcgagagaaacctgatctatatcacagtgatcgactccaccggcaagatcctggagcagcggagcctgaacaccatccagcagtttgattaccagaagaagctggacaacagggagaaggagagggtggcagcaaggcaggcctggtctgtggtgggcacaatcaaggatctgaagcagggctatctgagccaggtcatccacgagatcgtggacctgatgatccactaccaggccgtggtggtgctggagaacctgaatttcggctttaagagcaagaggaccggcatcgccgagaaggccgtgtaccagcagttcgagaagatgctgatcgataagctgaattgcctggtgctgaaggactatccagcagagaaagtgggaggcgtgctgaacccataccagctgacagaccagttcacctcctttgccaagatgggcacccagtctggcttcctgttttacgtgcctgccccatatacatctaagatcgatcccctgaccggcttcgtggaccccttcgtgtggaaaaccatcaagaatcacgagagccgcaagcacttcctggagggcttcgactttctgcactacgacgtgaaaaccggcgacttcatcctgcactttaagatgaacagaaatctgtccttccagaggggcctgcccggctttatgcctgcatgggatatcgtgttcgagaagaacgagacacagtttgacgccaagggcacccctttcatcgccggcaagagaatcgtgccagtgatcgagaatcacagattcaccggcagataccgggacctgtatcctgccaacgagctgatcgccctgctggaggagaagggcatcgtgttcagggatggctccaacatcctgccaaagctgctggagaatgacgattctcacgccatcgacaccatggtggccctgatccgcagcgtgctgcagatgcggaactccaatgccgccacaggcgaggactatatcaacagccccgtgcgcgatctgaatggcgtgtgcttcgactcccggtttcagaacccagagtggcccatggacgccgatgccaatggcgcctaccacatcgccctgaagggccagctgctgctgaatcacctgaaggagagcaaggatctgaagctgcagaacggcatctccaatcaggactggctggcctacatccaggagctgcgcaacggcggatcccctgctgctaaacgtgttaagcttgatgggggtagcccggcagccaagagagtcaaactcgactagatggtttatattgcggccgcttaattaagctgccttctgcggggcttgccttctggccatgcccttcttctctcccttgcacctgtacctcttggtctttgaataaagcctgagtaggaagtctagaaaaaaaaaaaaaaaaaaaaaaaaaaaaaaaaaaaaaaaaaaaaaaaaaaaaaaaaaaaaaaaaaaaaaaaaaaaaaaa

SEQ ID NO: 899 - RNA, 4248 nt, synthetic construct
  misc_feature 1..4248: note = Synthetic
  source 1..4248: mol_type = other RNA
aggaaataagagagaaaagaagagtaagaagaaatataagagccaccatgacacagttcgagggctttaccaacctgtatcaggtgagcaagacactgcggtttgagctgatcccacagggcaagaccctgaagcacatccaggagcagggcttcatcgaggaggacaaggcccgcaatgatcactacaaggagctgaagcccatcatcgatcggatctacaagacctatgccgaccagtgcctgcagctggtgcagctggattgggagaacctgagcgccgccatcgactcctatagaaaggagaaaaccgaggagacaaggaacgccctgatcgaggagcaggccacatatcgcaatgccatccacgactacttcatcggccggacagacaacctgaccgatgccatcaataagagacacgccgagatctacaagggcctgttcaaggccgagctgtttaatggcaaggtgctgaagcagctgggcaccgtgaccacaaccgagcacgagaacgccctgctgcggagcttcgacaagtttacaacctacttctccggcttttatgaaaacaggaagaacgtgttcagcgccgaggatatcagcacagccatcccacaccgcatcgtgcaggacaacttccccaagtttaaggagaattgtcacatcttcacacgcctgatcaccgccgtgcccagcctgcgggagcactttgagaacgtgaagaaggccatcggcatcttcgtgagcacctccatcgaggaggtgttttccttccctttttataaccagctgctgacacagacccagatcgacctgtataaccagctgctgggaggaatctctcgggaggcaggcaccgagaagatcaagggcctgaacgaggtgctgaatctggccatccagaagaatgatgagacagcccacatcatcgcctccctgccacacagattcatccccctgtttaagcagatcctgtccgataggaacaccctgtctttcatcctggaggagtttaagagcgacgaggaagtgatccagtccttctgcaagtacaagacactgctgagaaacgagaacgtgctggagacagccgaggccctgtttaacgagctgaacagcatcgacctgacacacatcttcatcagccacaagaagctggagacaatcagcagcgccctgtgcgaccactgggatacactgaggaatgccctgtatgagcggagaatctccgagctgacaggcaagatcaccaagtctgccaaggagaaggtgcagcgcagcctgaagcacgaggatatcaacctgcaggagatcatctctgccgcaggcaaggagctgagcgaggccttcaagcagaaaaccagcgagatcctgtcccacgcacacgccgccctggatcagccactgcctacaaccctgaagaagcaggaggagaaggagatcctgaagtctcagctggacagcctgctgggcctgtaccacctgctggactggtttgccgtggatgagtccaacgaggtggaccccgagttctctgcccggctgaccggcatcaagctggagatggagccttctctgagcttctacaacaaggccagaaattatgccaccaagaagccctactccgtggagaagttcaagctgaactttcagcggcctacactggcctctggctgggacgtgaataaggagaagaacaatggcgccatcctgtttgtgaagaacggcctgtactatctgggcatcatgccaaagcagaagggcaggtataaggccctgagcttcgagcccacagagaaaaccagcgagggctttgataagatgtactatgactacttccctgatgccgccaagatgatcccaaagtgcagcacccagctgaaggccgtgacagcccactttcagacccacacaacccccatcctgctgtccaacaatttcatcgagcctctggagatcacaaaggagatctacgacctgaacaatcctgagaaggagccaaagaagtttcagacagcctacgccaagaaaaccggcgaccagaagggctacagagaggccctgtgcaagtggatcgacttcacaagggattttctgtccaagtataccaagacaacctctatcgatctgtctagcctgcggccatcctctcagtataaggacctgggcgagtactatgccgagctgaatcccctgctgtaccacatcagcttccagagaatcgccgagaaggagatcatggatgccgtggagacaggcaagctgtacctgttccagatctataacaaggactttgccaagggccaccacggcaagcctaatctgcacacactgtattggaccggcctgttttctccagagaacctggccaagacaagcatcaagctgaatggccaggccgagctgttctaccgccctaagtccaggatgaagaggatggcagctcggctgggagagaagatgctgaacaagaagctgaaggatcagaaaaccccaatccccgacaccctgtaccaggagctgtacgactatgtgaatcacagactgtcccacgacctgtctgatgaggccagggccctgctgcccaacgtgatcaccaaggaggtgtctcacgagatcatcaaggataggcgctttaccagcgacaagttcttgttccacgtgcctatcacactgaactatcaggccgccaattccccatctaagttcaaccagagggtgaatgcctacctgaaggagcaccccgagacacctatcatcggcatcgatcggggcgagagaaacctgatctatatcacagtgatcgactccaccggcaagatcctggagcagcggagcctgaacaccatccagcagtttgattaccagaagaagctggacaacagggagaaggagagggtggcagcaaggcaggcctggtctgtggtgggcacaatcaaggatctgaagcagggctatctgagccaggtcatccacgagatcgtggacctgatgatccactaccaggccgtggtggtgctggagaacctgaatttcggctttaagagcaagaggaccggcatcgccgagaaggccgtgtaccagcagttcgagaagatgctgatcgataagctgaattgcctggtgctgaaggactatccagcagagaaagtgggaggcgtgctgaacccataccagctgacagaccagttcacctcctttgccaagatgggcacccagtctggcttcctgttttacgtgcctgccccatatacatctaagatcgatcccctgaccggcttcgtggaccccttcgtgtggaaaaccatcaagaatcacgagagccgcaagcacttcctggagggcttcgactttctgcactacgacgtgaaaaccggcgacttcatcctgcactttaagatgaacagaaatctgtccttccagaggggcctgcccggctttatgcctgcatgggatatcgtgttcgagaagaacgagacacagtttgacgccaagggcacccctttcatcgccggcaagagaatcgtgccagtgatcgagaatcacagattcaccggcagataccgggacctgtatcctgccaacgagctgatcgccctgctggaggagaagggcatcgtgttcagggatggctccaacatcctgccaaagctgctggagaatgacgattctcacgccatcgacaccatggtggccctgatccgcagcgtgctgcagatgcggaactccaatgccgccacaggcgaggactatatcaacagccccgtgcgcgatctgaatggcgtgtgcttcgactcccggtttcagaacccagagtggcccatggacgccgatgccaatggcgcctaccacatcgccctgaagggccagctgctgctgaatcacctgaaggagagcaaggatctgaagctgcagaacggcatctccaatcaggactggctggcctacatccaggagctgcgcaacggcggatcccctgctgctaaacgtgttaagcttgatgggggtagcccggcagccaagagagtcaaactcgactagatggtttatattgcggccgcttaattaagctgccttctgcggggcttgccttctggccatgcccttcttctctcccttgcacctgtacctcttggtctttgaataaagcctgagtaggaagtctagaaaaaaaaaaaaaaaaaaaaaaaaaaaaaaaaaaaaaaaaaaaaaaaaaaaaaaaaaaaaaaaaaaaaaaaaaaaaaaa

SEQ ID NO: 900 - RNA, 100 nt, synthetic construct; identical to SEQ ID NO: 31
  misc_feature 1..100: note = Synthetic
  source 1..100: mol_type = other RNA

SEQ ID NO: 901 - RNA, 100 nt, synthetic construct
  misc_feature 1..100: note = Synthetic
  source 1..100: mol_type = other RNA
ctgggcagggacgggactccgttttagagctagaaatagcaagttaaaataaggctagtccgttatcaacttgaaaaagtggcaccgagtcggtgctttt

SEQ ID NO: 902 - RNA, 100 nt, synthetic construct
  misc_feature 1..100: note = Synthetic
  source 1..100: mol_type = other RNA
gaggtctcaggaagggttctgttttagagctagaaatagcaagttaaaataaggctagtccgttatcaacttgaaaaagtggcaccgagtcggtgctttt

SEQ ID NO: 903 - RNA, 100 nt, synthetic construct
  misc_feature 1..100: note = Synthetic
  source 1..100: mol_type = other RNA
cgaggtctcaggaagggttcgttttagagctagaaatagcaagttaaaataaggctagtccgttatcaacttgaaaaagtggcaccgagtcggtgctttt

SEQ ID NO: 904 - RNA, 100 nt, synthetic construct
  misc_feature 1..100: note = Synthetic
  source 1..100: mol_type = other RNA
aacccttcctgagacctcgcgttttagagctagaaatagcaagttaaaataaggctagtccgttatcaacttgaaaaagtggcaccgagtcggtgctttt

SEQ ID NO: 905 - RNA, 100 nt, synthetic construct
  misc_feature 1..100: note = Synthetic
  source 1..100: mol_type = other RNA
ggccggcgaggtctcaggaagttttagagctagaaatagcaagttaaaataaggctagtccgttatcaacttgaaaaagtggcaccgagtcggtgctttt

SEQ ID NO: 906 - RNA, 100 nt, synthetic construct
  misc_feature 1..100: note = Synthetic
  source 1..100: mol_type = other RNA
aggccggcgaggtctcaggagttttagagctagaaatagcaagttaaaataaggctagtccgttatcaacttgaaaaagtggcaccgagtcggtgctttt

SEQ ID NO: 907 - RNA, 100 nt, synthetic construct
  misc_feature 1..100: note = Synthetic
  source 1..100: mol_type = other RNA
aacaaggccggcgaggtctcgttttagagctagaaatagcaagttaaaataaggctagtccgttatcaacttgaaaaagtggcaccgagtcggtgctttt

SEQ ID NO: 908 - RNA, 100 nt, synthetic construct
  misc_feature 1..100: note = Synthetic
  source 1..100: mol_type = other RNA
tgaataaaacaaggccggcggttttagagctagaaatagcaagttaaaataaggctagtccgttatcaacttgaaaaagtggcaccgagtcggtgctttt

SEQ ID NO: 909 - RNA, 100 nt, synthetic construct
  misc_feature 1..100: note = Synthetic
  source 1..100: mol_type = other RNA
gtctttgaataaaacaaggcgttttagagctagaaatagcaagttaaaataaggctagtccgttatcaacttgaaaaagtggcaccgagtcggtgctttt

SEQ ID NO: 910 - RNA, 100 nt, synthetic construct
  misc_feature 1..100: note = Synthetic
  source 1..100: mol_type = other RNA
ctctgtctttgaataaaacagttttagagctagaaatagcaagttaaaataaggctagtccgttatcaacttgaaaaagtggcaccgagtcggtgctttt

SEQ ID NO: 911 - RNA, 100 nt, synthetic construct
  misc_feature 1..100: note = Synthetic
  source 1..100: mol_type = other RNA
agctctggcaggcaatgcttgttttagagctagaaatagcaagttaaaataaggctagtccgttatcaacttgaaaaagtggcaccgagtcggtgctttt

SEQ ID NO: 912 - RNA, 100 nt, synthetic construct
  misc_feature 1..100: note = Synthetic
  source 1..100: mol_type = other RNA
atataaaacaaagctctggcgttttagagctagaaatagcaagttaaaataaggctagtccgttatcaacttgaaaaagtggcaccgagtcggtgctttt

SEQ ID NO: 913 - RNA, 100 nt, synthetic construct
  misc_feature 1..100: note = Synthetic
  source 1..100: mol_type = other RNA
aaatatataaaacaaagctcgttttagagctagaaatagcaagttaaaataaggctagtccgttatcaacttgaaaaagtggcaccgagtcggtgctttt

SEQ ID NO: 914 - RNA, 100 nt, synthetic construct
  misc_feature 1..100: note = Synthetic
  source 1..100: mol_type = other RNA
attcatctgggaggcagaacgttttagagctagaaatagcaagttaaaataaggctagtccgttatcaacttgaaaaagtggcaccgagtcggtgctttt

SEQ ID NO: 915 - RNA, 100 nt, synthetic construct
  misc_feature 1..100: note = Synthetic
  source 1..100: mol_type = other RNA
ctgggaggcagaacaggcttgttttagagctagaaatagcaagttaaaataaggctagtccgttatcaacttgaaaaagtggcaccgagtcggtgctttt

SEQ ID NO: 916 - RNA, 100 nt, synthetic construct
  misc_feature 1..100: note = Synthetic
  source 1..100: mol_type = other RNA
ttcggacagtgcccatgcaagttttagagctagaaatagcaagttaaaataaggctagtccgttatcaacttgaaaaagtggcaccgagtcggtgctttt

SEQ ID NO: 917 - RNA, 100 nt, synthetic construct
  misc_feature 1..100: note = Synthetic
  source 1..100: mol_type = other RNA
acagtgcccatgcaatggctgttttagagctagaaatagcaagttaaaataaggctagtccgttatcaacttgaaaaagtggcaccgagtcggtgctttt

SEQ ID NO: 918 - RNA, 100 nt, synthetic construct
  misc_feature 1..100: note = Synthetic
  source 1..100: mol_type = other RNA
cagtgcccatgcaatggcttgttttagagctagaaatagcaagttaaaataaggctagtccgttatcaacttgaaaaagtggcaccgagtcggtgctttt

SEQ ID NO: 919 - RNA, 100 nt, synthetic construct
  misc_feature 1..100: note = Synthetic
  source 1..100: mol_type = other RNA
gcccatgcaatggcttgggtgttttagagctagaaatagcaagttaaaataaggctagtccgttatcaacttgaaaaagtggcaccgagtcggtgctttt

SEQ ID NO: 920 - RNA, 100 nt, synthetic construct
  misc_feature 1..100: note = Synthetic
  source 1..100: mol_type = other RNA
cccatgcaatggcttgggttgttttagagctagaaatagcaagttaaaataaggctagtccgttatcaacttgaaaaagtggcaccgagtcggtgctttt

SEQ ID NO: 921 - RNA, 100 nt, synthetic construct
  misc_feature 1..100: note = Synthetic
  source 1..100: mol_type = other RNA
cccaacccaagccattgcatgttttagagctagaaatagcaagttaaaataaggctagtccgttatcaacttgaaaaagtggcaccgagtcggtgctttt

SEQ ID NO: 922 - RNA, 100 nt, synthetic construct
  misc_feature 1..100: note = Synthetic
  source 1..100: mol_type = other RNA
tcccaacccaagccattgcagttttagagctagaaatagcaagttaaaataaggctagtccgttatcaacttgaaaaagtggcaccgagtcggtgctttt

SEQ ID NO: 923 - RNA, 100 nt, synthetic construct
  misc_feature 1..100: note = Synthetic
  source 1..100: mol_type = other RNA
gtttcttcctttcctcgtgagttttagagctagaaatagcaagttaaaataaggctagtccgttatcaacttgaaaaagtggcaccgagtcggtgctttt

SEQ ID NO: 924 - RNA, 100 nt, synthetic construct
  misc_feature 1..100: note = Synthetic
  source 1..100: mol_type = other RNA
ctcttatccttcacgaggaagttttagagctagaaatagcaagttaaaataaggctagtccgttatcaacttgaaaaagtggcaccgagtcggtgctttt

SEQ ID NO: 925 - RNA, 100 nt, synthetic construct
  misc_feature 1..100: note = Synthetic
  source 1..100: mol_type = other RNA
tgtttctcttatccttcacggttttagagctagaaatagcaagttaaaataaggctagtccgttatcaacttgaaaaagtggcaccgagtcggtgctttt

SEQ ID NO: 926 - RNA, 100 nt, synthetic construct
  misc_feature 1..100: note = Synthetic
  source 1..100: mol_type = other RNA
aggataagagaaacaggcccgttttagagctagaaatagcaagttaaaataaggctagtccgttatcaacttgaaaaagtggcaccgagtcggtgctttt

SEQ ID NO: 927 - RNA, 100 nt, synthetic construct
  misc_feature 1..100: note = Synthetic
  source 1..100: mol_type = other RNA
ggataagagaaacaggcccggttttagagctagaaatagcaagttaaaataaggctagtccgttatcaacttgaaaaagtggcaccgagtcggtgctttt

SEQ ID NO: 928 - RNA, 100 nt, synthetic construct
  misc_feature 1..100: note = Synthetic
  source 1..100: mol_type = other RNA
gataagagaaacaggcccgggttttagagctagaaatagcaagttaaaataaggctagtccgttatcaacttgaaaaagtggcaccgagtcggtgctttt

SEQ ID NO: 929 - RNA, 100 nt, synthetic construct
  misc_feature 1..100: note = Synthetic
  source 1..100: mol_type = other RNA
ataagagaaacaggcccggggttttagagctagaaatagcaagttaaaataaggctagtccgttatcaacttgaaaaagtggcaccgagtcggtgctttt

SEQ ID NO: 930 - RNA, 100 nt, synthetic construct
  misc_feature 1..100: note = Synthetic
  source 1..100: mol_type = other RNA
gaaacaggcccggggggaccgttttagagctagaaatagcaagttaaaataaggctagtccgttatcaacttgaaaaagtggcaccgagtcggtgctttt

SEQ ID NO: 931 - RNA, 100 nt, synthetic construct
  misc_feature 1..100: note = Synthetic
  source 1..100: mol_type = other RNA
ggtgtcatcctggtccccccgttttagagctagaaatagcaagttaaaataaggctagtccgttatcaacttgaaaaagtggcaccgagtcggtgctttt

SEQ ID NO: 932 - RNA, 100 nt, synthetic construct
  misc_feature 1..100: note = Synthetic
  source 1..100: mol_type = other RNA
aggtgtcatcctggtcccccgttttagagctagaaatagcaagttaaaataaggctagtccgttatcaacttgaaaaagtggcaccgagtcggtgctttt

SEQ ID NO: 933 - RNA, 100 nt, synthetic construct
  misc_feature 1..100: note = Synthetic
  source 1..100: mol_type = other RNA
gagaaatggaggtgtcatccgttttagagctagaaatagcaagttaaaataaggctagtccgttatcaacttgaaaaagtggcaccgagtcggtgctttt

SEQ ID NO: 934 - RNA, 100 nt, synthetic construct
  misc_feature 1..100: note = Synthetic
  source 1..100: mol_type = other RNA
tgacacctccatttctctccgttttagagctagaaatagcaagttaaaataaggctagtccgttatcaacttgaaaaagtggcaccgagtcggtgctttt

SEQ ID NO: 935 - RNA, 100 nt, synthetic construct
  misc_feature 1..100: note = Synthetic
  source 1..100: mol_type = other RNA
aacttcctggagagaaatgggttttagagctagaaatagcaagttaaaataaggctagtccgttatcaacttgaaaaagtggcaccgagtcggtgctttt

SEQ ID NO: 936 - RNA, 100 nt, synthetic construct
  misc_feature 1..100: note = Synthetic
  source 1..100: mol_type = other RNA
caaaacttcctggagagaaagttttagagctagaaatagcaagttaaaataaggctagtccgttatcaacttgaaaaagtggcaccgagtcggtgctttt

SEQ ID NO: 937 - RNA, 100 nt, synthetic construct
  misc_feature 1..100: note = Synthetic
  source 1..100: mol_type = other RNA
gagagaaactcaaaacttccgttttagagctagaaatagcaagttaaaataaggctagtccgttatcaacttgaaaaagtggcaccgagtcggtgctttt

SEQ ID NO: 938 - RNA, 100 nt, synthetic construct
  misc_feature 1..100: note = Synthetic
  source 1..100: mol_type = other RNA
gtttgaggattgtgtcacgggttttagagctagaaatagcaagttaaaataaggctagtccgttatcaacttgaaaaagtggcaccgagtcggtgctttt

SEQ ID NO: 939 - RNA, 100 nt, synthetic construct
  misc_feature 1..100: note = Synthetic
  source 1..100: mol_type = other RNA
cgtgacacaatcctcaaacagttttagagctagaaatagcaagttaaaataaggctagtccgttatcaacttgaaaaagtggcaccgagtcggtgctttt

SEQ ID NO: 940 - RNA, 100 nt, synthetic construct
  misc_feature 1..100: note = Synthetic
  source 1..100: mol_type = other RNA
catgtttgaggattgtgtcagttttagagctagaaatagcaagttaaaataaggctagtccgttatcaacttgaaaaagtggcaccgagtcggtgctttt

SEQ ID NO: 941 - RNA, 100 nt, synthetic construct
  misc_feature 1..100: note = Synthetic
  source 1..100: mol_type = other RNA
cctcaaacatggaagatgaagttttagagctagaaatagcaagttaaaataaggctagtccgttatcaacttgaaaaagtggcaccgagtcggtgctttt

SEQ ID NO: 942 - RNA, 100 nt, synthetic construct
  misc_feature 1..100: note = Synthetic
  source 1..100: mol_type = other RNA
ctcaaacatggaagatgaaagttttagagctagaaatagcaagttaaaataaggctagtccgttatcaacttgaaaaagtggcaccgagtcggtgctttt

SEQ ID NO: 943 - RNA, 100 nt, synthetic construct
  misc_feature 1..100: note = Synthetic
  source 1..100: mol_type = other RNA
tcaaacatggaagatgaaaggttttagagctagaaatagcaagttaaaataaggctagtccgttatcaacttgaaaaagtggcaccgagtcggtgctttt

SEQ ID NO: 944 - RNA, 100 nt, synthetic construct
  misc_feature 1..100: note = Synthetic
  source 1..100: mol_type = other RNA
cctttcatcttccatgtttggttttagagctagaaatagcaagttaaaataaggctagtccgttatcaacttgaaaaagtggcaccgagtcggtgctttt

SEQ ID NO: 945 - RNA, 100 nt, synthetic construct
  misc_feature 1..100: note = Synthetic
  source 1..100: mol_type = other RNA
gtcaggcccagagaagcaaggttttagagctagaaatagcaagttaaaataaggctagtccgttatcaacttgaaaaagtggcaccgagtcggtgctttt

SEQ ID NO: 946 - RNA, 100 nt, synthetic construct
  misc_feature 1..100: note = Synthetic
  source 1..100: mol_type = other RNA
tgaaagccacttgcttctctgttttagagctagaaatagcaagttaaaataaggctagtccgttatcaacttgaaaaagtggcaccgagtcggtgctttt

SEQ ID NO: 947 - RNA, 100 nt, synthetic construct
  misc_feature 1..100: note = Synthetic
  source 1..100: mol_type = other RNA
ttgaaagccacttgcttctcgttttagagctagaaatagcaagttaaaataaggctagtccgttatcaacttgaaaaagtggcaccgagtcggtgctttt

SEQ ID NO: 948 - RNA, 100 nt, synthetic construct
  misc_feature 1..100: note = Synthetic
  source 1..100: mol_type = other RNA
tttcaacacacaacagcagagttttagagctagaaatagcaagttaaaataaggctagtccgttatcaacttgaaaaagtggcaccgagtcggtgctttt

SEQ ID NO: 949 - RNA, 100 nt, synthetic construct
  misc_feature 1..100: note = Synthetic
  source 1..100: mol_type = other RNA
acaacagcagatggcaccaagttttagagctagaaatagcaagttaaaataaggctagtccgttatcaacttgaaaaagtggcaccgagtcggtgctttt

SEQ ID NO: 950 - RNA, 100 nt, synthetic construct
  misc_feature 1..100: note = Synthetic
  source 1..100: mol_type = other RNA
caacagcagatggcaccaacgttttagagctagaaatagcaagttaaaataaggctagtccgttatcaacttgaaaaagtggcaccgagtcggtgctttt

SEQ ID NO: 951 - RNA, 100 nt, synthetic construct
  misc_feature 1..100: note = Synthetic
  source 1..100: mol_type = other RNA
atggcaccaacgggacccccgttttagagctagaaatagcaagttaaaataaggctagtccgttatcaacttgaaaaagtggcaccgagtcggtgctttt

SEQ ID NO: 952 - RNA, 100 nt, synthetic construct
  misc_feature 1..100: note = Synthetic
  source 1..100: mol_type = other RNA
gcagggccagggggtcccgtgttttagagctagaaatagcaagttaaaataaggctagtccgttatcaacttgaaaaagtggcaccgagtcggtgctttt

SEQ ID NO: 953 - RNA, 100 nt, synthetic construct
  misc_feature 1..100: note = Synthetic
  source 1..100: mol_type = other RNA
gtggatgaggcagggccagggttttagagctagaaatagcaagttaaaataaggctagtccgttatcaacttgaaaaagtggcaccgagtcggtgctttt

SEQ ID NO: 954 - RNA, 100 nt, synthetic construct
  misc_feature 1..100: note = Synthetic
  source 1..100: mol_type = other RNA
agagattggtggatgaggcagttttagagctagaaatagcaagttaaaataaggctagtccgttatcaacttgaaaaagtggcaccgagtcggtgctttt

SEQ ID NO: 955 - RNA, 100 nt, synthetic construct
  misc_feature 1..100: note = Synthetic
  source 1..100: mol_type = other RNA
ggcttagagattggtggatggttttagagctagaaatagcaagttaaaataaggctagtccgttatcaacttgaaaaagtggcaccgagtcggtgctttt

SEQ ID NO: 956 - RNA, 100 nt, synthetic construct
  misc_feature 1..100: note = Synthetic
  source 1..100: mol_type = other RNA
gggtttggcttagagattgggttttagagctagaaatagcaagttaaaataaggctagtccgttatcaacttgaaaaagtggcaccgagtcggtgctttt

SEQ ID NO: 957 - RNA, 100 nt, synthetic construct
  misc_feature 1..100: note = Synthetic
  source 1..100: mol_type = other RNA
taggggtttggcttagagatgttttagagctagaaatagcaagttaaaataaggctagtccgttatcaacttgaaaaagtggcaccgagtcggtgctttt

SEQ ID NO: 958 - RNA, 100 nt, synthetic construct
  misc_feature 1..100: note = Synthetic
  source 1..100: mol_type = other RNA
taagccaaacccctaaactcgttttagagctagaaatagcaagttaaaataaggctagtccgttatcaacttgaaaaagtggcaccgagtcggtgctttt

SEQ ID NO: 959 - RNA, 100 nt, synthetic construct
  misc_feature 1..100: note = Synthetic
  source 1..100: mol_type = other RNA
gactcctgagtttaggggttgttttagagctagaaatagcaagttaaaataaggctagtccgttatcaacttgaaaaagtggcaccgagtcggtgctttt

SEQ ID NO: 960 - RNA, 100 nt, synthetic construct
  misc_feature 1..100: note = Synthetic
  source 1..100: mol_type = other RNA
acgttgactcctgagtttaggttttagagctagaaatagcaagttaaaataaggctagtccgttatcaacttgaaaaagtggcaccgagtcggtgctttt

SEQ ID NO: 961 - RNA, 100 nt, synthetic construct
  misc_feature 1..100: note = Synthetic
  source 1..100: mol_type = other RNA
cacgttgactcctgagtttagttttagagctagaaatagcaagttaaaataaggctagtccgttatcaacttgaaaaagtggcaccgagtcggtgctttt

SEQ ID NO: 962 - RNA, 100 nt, synthetic construct
  misc_feature 1..100: note = Synthetic
  source 1..100: mol_type = other RNA
acacgttgactcctgagtttgttttagagctagaaatagcaagttaaaataaggctagtccgttatcaacttgaaaaagtggcaccgagtcggtgctttt

SEQ ID NO: 963 - RNA, 100 nt, synthetic construct
  misc_feature 1..100: note = Synthetic
  source 1..100: mol_type = other RNA
gcaagccttgctagacagccgttttagagctagaaatagcaagttaaaataaggctagtccgttatcaacttgaaaaagtggcaccgagtcggtgctttt

SEQ ID NO: 964 - RNA, 100 nt, synthetic construct
  misc_feature 1..100: note = Synthetic
  source 1..100: mol_type = other RNA
gctaacctggctgtctagcagttttagagctagaaatagcaagttaaaataaggctagtccgttatcaacttgaaaaagtggcaccgagtcggtgctttt

SEQ ID NO: 965 - RNA, 100 nt, synthetic construct
  misc_feature 1..100: note = Synthetic
  source 1..100: mol_type = other RNA
tgacagggcaaaggctaaccgttttagagctagaaatagcaagttaaaataaggctagtccgttatcaacttgaaaaagtggcaccgagtcggtgctttt

SEQ ID NO: 966 - RNA, 100 nt, synthetic construct
  misc_feature 1..100: note = Synthetic
  source 1..100: mol_type = other RNA
attcgggggtgacagggcaagttttagagctagaaatagcaagttaaaataaggctagtccgttatcaacttgaaaaagtggcaccgagtcggtgctttt

SEQ ID NO: 967 - RNA, 100 nt, synthetic construct
  misc_feature 1..100: note = Synthetic
  source 1..100: mol_type = other RNA
gtcatgattcgggggtgacagttttagagctagaaatagcaagttaaaataaggctagtccgttatcaacttgaaaaagtggcaccgagtcggtgctttt

SEQ ID NO: 968 - RNA, 100 nt, synthetic construct
  misc_feature 1..100: note = Synthetic
  source 1..100: mol_type = other RNA
ggtcatgattcgggggtgacgttttagagctagaaatagcaagttaaaataaggctagtccgttatcaacttgaaaaagtggcaccgagtcggtgctttt

SEQ ID NO: 969 - RNA, 100 nt, synthetic construct
  misc_feature 1..100: note = Synthetic
  source 1..100: mol_type = other RNA
ctgggtgggtcatgattcgggttttagagctagaaatagcaagttaaaataaggctagtccgttatcaacttgaaaaagtggcaccgagtcggtgctttt

SEQ ID NO: 970 - RNA, 100 nt, synthetic construct
  misc_feature 1..100: note = Synthetic
  source 1..100: mol_type = other RNA
actgggtgggtcatgattcggttttagagctagaaatagcaagttaaaataaggctagtccgttatcaacttgaaaaagtggcaccgagtcggtgctttt

SEQ ID NO: 971 - RNA, 100 nt, synthetic construct
  misc_feature 1..100: note = Synthetic
  source 1..100: mol_type = other RNA
cactgggtgggtcatgattcgttttagagctagaaatagcaagttaaaataaggctagtccgttatcaacttgaaaaagtggcaccgagtcggtgctttt

SEQ ID NO: 972 - RNA, 100 nt, synthetic construct
  misc_feature 1..100: note = Synthetic
  source 1..100: mol_type = other RNA
acactgggtgggtcatgattgttttagagctagaaatagcaagttaaaataaggctagtccgttatcaacttgaaaaagtggcaccgagtcggtgctttt

SEQ ID NO: 973 - RNA, 100 nt, synthetic construct
  misc_feature 1..100: note = Synthetic
  source 1..100: mol_type = other RNA
gacccacccagtgtctttcggttttagagctagaaatagcaagttaaaataaggctagtccgttatcaacttgaaaaagtggcaccgagtcggtgctttt

SEQ ID NO: 974 - RNA, 100 nt, synthetic construct
  misc_feature 1..100: note = Synthetic
  source 1..100: mol_type = other RNA
ccacccagtgtctttcgagggttttagagctagaaatagcaagttaaaataaggctagtccgttatcaacttgaaaaagtggcaccgagtcggtgctttt

SEQ ID NO: 975 - RNA, 100 nt, synthetic construct
  misc_feature 1..100: note = Synthetic
  source 1..100: mol_type = other RNA
cacccagtgtctttcgaggtgttttagagctagaaatagcaagttaaaataaggctagtccgttatcaacttgaaaaagtggcaccgagtcggtgctttt

SEQ ID NO: 976 - RNA, 100 nt, synthetic construct
  misc_feature 1..100: note = Synthetic
  source 1..100: mol_type = other RNA
cacctcgaaagacactgggtgttttagagctagaaatagcaagttaaaataaggctagtccgttatcaacttgaaaaagtggcaccgagtcggtgctttt

SEQ ID NO: 977 - RNA, 100 nt, synthetic construct
  misc_feature 1..100: note = Synthetic
  source 1..100: mol_type = other RNA
aacccacctcgaaagacactgttttagagctagaaatagcaagttaaaataaggctagtccgttatcaacttgaaaaagtggcaccgagtcggtgctttt

SEQ ID NO: 978 - RNA, 100 nt, synthetic construct
  misc_feature 1..100: note = Synthetic
  source 1..100: mol_type = other RNA
aaacccacctcgaaagacacgttttagagctagaaatagcaagttaaaataaggctagtccgttatcaacttgaaaaagtggcaccgagtcggtgctttt

SEQ ID NO: 979 - RNA, 100 nt, synthetic construct
  misc_feature 1..100: note = Synthetic
  source 1..100: mol_type = other RNA
gtttgtaccttccttaagccgttttagagctagaaatagcaagttaaaataaggctagtccgttatcaacttgaaaaagtggcaccgagtcggtgctttt

SEQ ID NO: 980 - RNA, 100 nt, synthetic construct
  misc_feature 1..100: note = Synthetic
  source 1..100: mol_type = other RNA
taccttccttaagccaggaagttttagagctagaaatagcaagttaaaataaggctagtccgttatcaacttgaaaaagtggcaccgagtcggtgctttt

SEQ ID NO: 981 - RNA, 100 nt, synthetic construct
  misc_feature 1..100: note = Synthetic
  source 1..100: mol_type = other RNA
accttccttaagccaggaaagttttagagctagaaatagcaagttaaaataaggctagtccgttatcaacttgaaaaagtggcaccgagtcggtgctttt

SEQ ID NO: 982 - RNA, 100 nt, synthetic construct
  misc_feature 1..100: note = Synthetic
  source 1..100: mol_type = other RNA
tccctttcctggcttaaggagttttagagctagaaatagcaagttaaaataaggctagtccgttatcaacttgaaaaagtggcaccgagtcggtgctttt

SEQ ID NO: 983 - RNA, 100 nt, synthetic construct
  misc_feature 1..100: note = Synthetic
  source 1..100: mol_type = other RNA
tgaatccctttcctggcttagttttagagctagaaatagcaagttaaaataaggctagtccgttatcaacttgaaaaagtggcaccgagtcggtgctttt

SEQ ID NO: 984 - RNA, 100 nt, synthetic construct
  misc_feature 1..100: note = Synthetic
  source 1..100: mol_type = other RNA
taagccaggaaagggattcagttttagagctagaaatagcaagttaaaataaggctagtccgttatcaacttgaaaaagtggcaccgagtcggtgctttt

SEQ ID NO: 985 - RNA, 100 nt, synthetic construct
  misc_feature 1..100: note = Synthetic
  source 1..100: mol_type = other RNA
aggaaagggattcatggcgtgttttagagctagaaatagcaagttaaaataaggctagtccgttatcaacttgaaaaagtggcaccgagtcggtgctttt

SEQ ID NO: 986 - RNA, 100 nt, synthetic construct
  misc_feature 1..100: note = Synthetic
  source 1..100: mol_type = other RNA
gacgccatgaatccctttccgttttagagctagaaatagcaagttaaaataaggctagtccgttatcaacttgaaaaagtggcaccgagtcggtgctttt

SEQ ID NO: 987 - RNA, 100 nt, synthetic construct
  misc_feature 1..100: note = Synthetic
  source 1..100: mol_type = other RNA
tcatggcgtcggaaatgatcgttttagagctagaaatagcaagttaaaataaggctagtccgttatcaacttgaaaaagtggcaccgagtcggtgctttt

SEQ ID NO: 988 - RNA, 100 nt, synthetic construct
  misc_feature 1..100: note = Synthetic
  source 1..100: mol_type = other RNA
aaatgatctggctgaatccggttttagagctagaaatagcaagttaaaataaggctagtccgttatcaacttgaaaaagtggcaccgagtcggtgctttt

SEQ ID NO: 989 - RNA, 100 nt, synthetic construct
  misc_feature 1..100: note = Synthetic
  source 1..100: mol_type = other RNA
tgatctggctgaatccgtgggttttagagctagaaatagcaagttaaaataaggctagtccgttatcaacttgaaaaagtggcaccgagtcggtgctttt

SEQ ID NO: 990 - RNA, 100 nt, synthetic construct
  misc_feature 1..100: note = Synthetic
  source 1..100: mol_type = other RNA
gtttggtctcggtgccaccagttttagagctagaaatagcaagttaaaataaggctagtccgttatcaacttgaaaaagtggcaccgagtcggtgctttt

SEQ ID NO: 991 - RNA, 100 nt, synthetic construct
  misc_feature 1..100: note = Synthetic
  source 1..100: mol_type = other RNA
ttggtgaatgagtttggtctgttttagagctagaaatagcaagttaaaataaggctagtccgttatcaacttgaaaaagtggcaccgagtcggtgctttt

SEQ ID NO: 992 - RNA, 100 nt, synthetic construct
  misc_feature 1..100: note = Synthetic
  source 1..100: mol_type = other RNA
catcatttggtgaatgagttgttttagagctagaaatagcaagttaaaataaggctagtccgttatcaacttgaaaaagtggcaccgagtcggtgctttt

SEQ ID NO: 993 - RNA, 100 nt, synthetic construct
  misc_feature 1..100: note = Synthetic
  source 1..100: mol_type = other RNA
caaatgatgccacttcccaggttttagagctagaaatagcaagttaaaataaggctagtccgttatcaacttgaaaaagtggcaccgagtcggtgctttt

SEQ ID NO: 994 - RNA, 100 nt, synthetic construct
  misc_feature 1..100: note = Synthetic
  source 1..100: mol_type = other RNA
ctctgggaagtggcatcattgttttagagctagaaatagcaagttaaaataaggctagtccgttatcaacttgaaaaagtggcaccgagtcggtgctttt

SEQ ID NO: 995 - RNA, 100 nt, synthetic construct
  misc_feature 1..100: note = Synthetic
  source 1..100: mol_type = other RNA
caggctctgcctctgggaaggttttagagctagaaatagcaagttaaaataaggctagtccgttatcaacttgaaaaagtggcaccgagtcggtgctttt

SEQ ID NO: 996 - RNA, 100 nt, synthetic construct
  misc_feature 1..100: note = Synthetic
  source 1..100: mol_type = other RNA
agaggcagagcctgagtcacgttttagagctagaaatagcaagttaaaataaggctagtccgttatcaacttgaaaaagtggcaccgagtcggtgctttt

SEQ ID NO: 997 - RNA, 100 nt, synthetic construct
  misc_feature 1..100: note = Synthetic
  source 1..100: mol_type = other RNA
agtgactcaggctctgcctcgttttagagctagaaatagcaagttaaaataaggctagtccgttatcaacttgaaaaagtggcaccgagtcggtgctttt

SEQ ID NO: 998 - RNA, 100 nt, synthetic construct
  misc_feature 1..100: note = Synthetic
  source 1..100: mol_type = other RNA
ttaagggtgaccagtgactcgttttagagctagaaatagcaagttaaaataaggctagtccgttatcaacttgaaaaagtggcaccgagtcggtgctttt

SEQ ID NO: 999 - RNA, 100 nt, synthetic construct
  misc_feature 1..100: note = Synthetic
  source 1..100: mol_type = other RNA
caggcacttaataaatattagttttagagctagaaatagcaagttaaaataaggctagtccgttatcaacttgaaaaagtggcaccgagtcggtgctttt

SEQ ID NO: 1000 - RNA, 100 nt, synthetic construct
  misc_feature 1..100: note = Synthetic
  source 1..100: mol_type = other RNA
tattaagtgcctgagacaccgttttagagctagaaatagcaagttaaaataaggctagtccgttatcaacttgaaaaagtggcaccgagtcggtgctttt

SEQ ID NO: 1001 - RNA, 100 nt, synthetic construct
  misc_feature 1..100: note = Synthetic
  source 1..100: mol_type = other RNA
cctgagacacccggttacctgttttagagctagaaatagcaagttaaaataaggctagtccgttatcaacttgaaaaagtggcaccgagtcggtgctttt

SEQ ID NO: 1002 - RNA, 100 nt, synthetic construct
  misc_feature 1..100: note = Synthetic
  source 1..100: mol_type = other RNA
ccaaggtaaccgggtgtctcgttttagagctagaaatagcaagttaaaataaggctagtccgttatcaacttgaaaaagtggcaccgagtcggtgctttt

SEQ ID NO: 1003 - RNA, 100 nt, synthetic construct
  misc_feature 1..100: note = Synthetic
  source 1..100: mol_type = other RNA
acccggttaccttggccgtggttttagagctagaaatagcaagttaaaataaggctagtccgttatcaacttgaaaaagtggcaccgagtcggtgctttt

SEQ ID NO: 1004 - RNA, 100 nt, synthetic construct
  misc_feature 1..100: note = Synthetic
  source 1..100: mol_type = other RNA
tcctcacggccaaggtaaccgttttagagctagaaatagcaagttaaaataaggctagtccgttatcaacttgaaaaagtggcaccgagtcggtgctttt

SEQ ID NO: 1005 - RNA, 100 nt, synthetic construct
  misc_feature 1..100: note = Synthetic
  source 1..100: mol_type = other RNA
gtcctcacggccaaggtaacgttttagagctagaaatagcaagttaaaataaggctagtccgttatcaacttgaaaaagtggcaccgagtcggtgctttt

SEQ ID NO: 1006 - RNA, 100 nt, synthetic construct
  misc_feature 1..100: note = Synthetic
  source 1..100: mol_type = other RNA
accttggccgtgaggacacggttttagagctagaaatagcaagttaaaataaggctagtccgttatcaacttgaaaaagtggcaccgagtcggtgctttt

SEQ ID NO: 1007 - RNA, 100 nt, synthetic construct
  misc_feature 1..100: note = Synthetic
  source 1..100: mol_type = other RNA
gccacgtgtcctcacggccagttttagagctagaaatagcaagttaaaataaggctagtccgttatcaacttgaaaaagtggcaccgagtcggtgctttt

SEQ ID NO: 1008 - RNA, 100 nt, synthetic construct
  misc_feature 1..100: note = Synthetic
  source 1..100: mol_type = other RNA
gtgcaggccacgtgtcctcagttttagagctagaaatagcaagttaaaataaggctagtccgttatcaacttgaaaaagtggcaccgagtcggtgctttt

SEQ ID NO: 1009 - RNA, 100 nt, synthetic construct
  misc_feature 1..100: note = Synthetic
  source 1..100: mol_type = other RNA
aggacacgtggcctgcacccgttttagagctagaaatagcaagttaaaataaggctagtccgttatcaacttgaaaaagtggcaccgagtcggtgctttt

SEQ ID NO: 1010 - RNA, 100 nt, synthetic construct
  misc_feature 1..100: note = Synthetic
  source 1..100: mol_type = other RNA
acgtggcctgcacccaggtggttttagagctagaaatagcaagttaaaataaggctagtccgttatcaacttgaaaaagtggcaccgagtcggtgctttt

SEQ ID NO: 1011 - RNA, 100 nt, synthetic construct
  misc_feature 1..100: note = Synthetic
  source 1..100: mol_type = other RNA
tgcacccaggtgtggctgtcgttttagagctagaaatagcaagttaaaataaggctagtccgttatcaacttgaaaaagtggcaccgagtcggtgctttt

SEQ ID NO: 1012 - RNA, 100 nt, synthetic construct
  misc_feature 1..100: note = Synthetic
  source 1..100: mol_type = other RNA
tgacagccacacctgggtgcgttttagagctagaaatagcaagttaaaataaggctagtccgttatcaacttgaaaaagtggcaccgagtcggtgctttt

SEQ ID NO: 1013 - RNA, 100 nt, synthetic construct
  misc_feature 1..100: note = Synthetic
  source 1..100: mol_type = other RNA
gtgtcctgacagccacacctgttttagagctagaaatagcaagttaaaataaggctagtccgttatcaacttgaaaaagtggcaccgagtcggtgctttt

SEQ ID NO: 1014 - RNA, 100 nt, synthetic construct
  misc_feature 1..100: note = Synthetic
  source 1..100: mol_type = other RNA
ggtgtcctgacagccacaccgttttagagctagaaatagcaagttaaaataaggctagtccgttatcaacttgaaaaagtggcaccgagtcggtgctttt

SEQ ID NO: 1015 - RNA, 100 nt, synthetic construct
  misc_feature 1..100: note = Synthetic
  source 1..100: mol_type = other RNA
tggctgtcaggacaccagccgttttagagctagaaatagcaagttaaaataaggctagtccgttatcaacttgaaaaagtggcaccgagtcggtgctttt

SEQ ID NO: 1016 - RNA, 100 nt, synthetic construct
  misc_feature 1..100: note = Synthetic
  source 1..100: mol_type = other RNA
cgggaggatgggcaccaggcgttttagagctagaaatagcaagttaaaataaggctagtccgttatcaacttgaaaaagtggcaccgagtcggtgctttt

SEQ ID NO: 1017 - RNA, 100 nt, synthetic construct
  misc_feature 1..100: note = Synthetic
  source 1..100: mol_type = other RNA
gggtcgggaggatgggcaccgttttagagctagaaatagcaagttaaaataaggctagtccgttatcaacttgaaaaagtggcaccgagtcggtgctttt

SEQ ID NO: 1018 - RNA, 100 nt, synthetic construct
  misc_feature 1..100: note = Synthetic
  source 1..100: mol_type = other RNA
tgggtaggggtcgggaggatgttttagagctagaaatagcaagttaaaataaggctagtccgttatcaacttgaaaaagtggcaccgagtcggtgctttt

SEQ ID NO: 1019 - RNA, 100 nt, synthetic construct
  misc_feature 1..100: note = Synthetic
  source 1..100: mol_type = other RNA
ggaagtgggtaggggtcggggttttagagctagaaatagcaagttaaaataaggctagtccgttatcaacttgaaaaagtggcaccgagtcggtgctttt

SEQ ID NO: 1020 - RNA, 100 nt, synthetic construct
  misc_feature 1..100: note = Synthetic
  source 1..100: mol_type = other RNA
cctacccacttccattcccggttttagagctagaaatagcaagttaaaataaggctagtccgttatcaacttgaaaaagtggcaccgagtcggtgctttt

SEQ ID NO: 1021 - RNA, 100 nt, synthetic construct
  misc_feature 1..100: note = Synthetic
  source 1..100: mol_type = other RNA
acgggaatggaagtgggtaggttttagagctagaaatagcaagttaaaataaggctagtccgttatcaacttgaaaaagtggcaccgagtcggtgctttt

SEQ ID NO: 1022 - RNA, 100 nt, synthetic construct
  misc_feature 1..100: note = Synthetic
  source 1..100: mol_type = other RNA
cacgggaatggaagtgggtagttttagagctagaaatagcaagttaaaataaggctagtccgttatcaacttgaaaaagtggcaccgagtcggtgctttt

SEQ ID NO: 1023 - RNA, 100 nt, synthetic construct
  misc_feature 1..100: note = Synthetic
  source 1..100: mol_type = other RNA
ccacgggaatggaagtgggtgttttagagctagaaatagcaagttaaaataaggctagtccgttatcaacttgaaaaagtggcaccgagtcggtgctttt

SEQ ID NO: 1024 - RNA, 100 nt, synthetic construct
  misc_feature 1..100: note = Synthetic
  source 1..100: mol_type = other RNA
gagaccacgggaatggaagtgttttagagctagaaatagcaagttaaaataaggctagtccgttatcaacttgaaaaagtggcaccgagtcggtgctttt

SEQ ID NO: 1025 - RNA, 100 nt, synthetic construct
  misc_feature 1..100: note = Synthetic
  source 1..100: mol_type = other RNA
ggagaccacgggaatggaaggttttagagctagaaatagcaagttaaaataaggctagtccgttatcaacttgaaaaagtggcaccgagtcggtgctttt

SEQ ID NO: 1026 - RNA, 100 nt, synthetic construct
  misc_feature 1..100: note = Synthetic
  source 1..100: mol_type = other RNA
gtgcaaggagaccacgggaagttttagagctagaaatagcaagttaaaataaggctagtccgttatcaacttgaaaaagtggcaccgagtcggtgctttt

SEQ ID NO: 1027 - RNA, 100 nt, synthetic construct
  misc_feature 1..100: note = Synthetic
  source 1..100: mol_type = other RNA
agaaagtgcaaggagaccacgttttagagctagaaatagcaagttaaaataaggctagtccgttatcaacttgaaaaagtggcaccgagtcggtgctttt

SEQ ID NO: 1028 - RNA, 100 nt, synthetic construct
  misc_feature 1..100: note = Synthetic
  source 1..100: mol_type = other RNA
gagaaagtgcaaggagaccagttttagagctagaaatagcaagttaaaataaggctagtccgttatcaacttgaaaaagtggcaccgagtcggtgctttt

SEQ ID NO: 1029 - RNA, 100 nt, synthetic construct
  misc_feature 1..100: note = Synthetic
  source 1..100: mol_type = other RNA
ctctgaactgagaaagtgcagttttagagctagaaatagcaagttaaaataaggctagtccgttatcaacttgaaaaagtggcaccgagtcggtgctttt

SEQ ID NO: 1030 - RNA, 100 nt, synthetic construct
  misc_feature 1..100: note = Synthetic
  source 1..100: mol_type = other RNA
agttgtacactgtgtacattgttttagagctagaaatagcaagttaaaataaggctagtccgttatcaacttgaaaaagtggcaccgagtcggtgctttt

SEQ ID NO: 1031 - RNA, 100 nt, synthetic construct
  misc_feature 1..100: note = Synthetic
  source 1..100: mol_type = other RNA
tgttttctgtcgtgtgtgttgttttagagctagaaatagcaagttaaaataaggctagtccgttatcaacttgaaaaagtggcaccgagtcggtgctttt

SEQ ID NO: 1032 - RNA, 100 nt, synthetic construct
  misc_feature 1..100: note = Synthetic
  source 1..100: mol_type = other RNA
ttctgtcgtgtgtgttgggagttttagagctagaaatagcaagttaaaataaggctagtccgttatcaacttgaaaaagtggcaccgagtcggtgctttt

SEQ ID NO: 1033 - RNA, 100 nt, synthetic construct
  misc_feature 1..100: note = Synthetic
  source 1..100: mol_type = other RNA
tctgtcgtgtgtgttgggatgttttagagctagaaatagcaagttaaaataaggctagtccgttatcaacttgaaaaagtggcaccgagtcggtgctttt

SEQ ID NO: 1034 - RNA, 100 nt, synthetic construct
  misc_feature 1..100: note = Synthetic
  source 1..100: mol_type = other RNA
gtgtgttgggatgggatcccgttttagagctagaaatagcaagttaaaataaggctagtccgttatcaacttgaaaaagtggcaccgagtcggtgctttt

SEQ ID NO: 1035 - RNA, 100 nt, synthetic construct
  misc_feature 1..100: note = Synthetic
  source 1..100: mol_type = other RNA
acacgggctttccctggcctgttttagagctagaaatagcaagttaaaataaggctagtccgttatcaacttgaaaaagtggcaccgagtcggtgctttt

SEQ ID NO: 1036 - RNA, 100 nt, synthetic construct
  misc_feature 1..100: note = Synthetic
  source 1..100: mol_type = other RNA
gacacgggctttccctggccgttttagagctagaaatagcaagttaaaataaggctagtccgttatcaacttgaaaaagtggcaccgagtcggtgctttt

SEQ ID NO: 1037 - RNA, 100 nt, synthetic construct
  misc_feature 1..100: note = Synthetic
  source 1..100: mol_type = other RNA
tcattgacacgggctttcccgttttagagctagaaatagcaagttaaaataaggctagtccgttatcaacttgaaaaagtggcaccgagtcggtgctttt

SEQ ID NO: 1038 - RNA, 100 nt, synthetic construct
  misc_feature 1..100: note = Synthetic
  source 1..100: mol_type = other RNA
aagcccgtgtcaatgaatgcgttttagagctagaaatagcaagttaaaataaggctagtccgttatcaacttgaaaaagtggcaccgagtcggtgctttt

SEQ ID NO: 1039 - RNA, 100 nt, synthetic construct
  misc_feature 1..100: note = Synthetic
  source 1..100: mol_type = other RNA
agcccgtgtcaatgaatgccgttttagagctagaaatagcaagttaaaataaggctagtccgttatcaacttgaaaaagtggcaccgagtcggtgctttt

SEQ ID NO: 1040 - RNA, 100 nt, synthetic construct
  misc_feature 1..100: note = Synthetic
  source 1..100: mol_type = other RNA
gcccgtgtcaatgaatgccggttttagagctagaaatagcaagttaaaataaggctagtccgttatcaacttgaaaaagtggcaccgagtcggtgctttt

SEQ ID NO: 1041 - RNA, 100 nt, synthetic construct
  misc_feature 1..100: note = Synthetic
  source 1..100: mol_type = other RNA
tccccggcattcattgacacgttttagagctagaaatagcaagttaaaataaggctagtccgttatcaacttgaaaaagtggcaccgagtcggtgctttt

SEQ ID NO: 1042 - RNA, 100 nt, synthetic construct
  misc_feature 1..100: note = Synthetic
  source 1..100: mol_type = other RNA
gtccccggcattcattgacagttttagagctagaaatagcaagttaaaataaggctagtccgttatcaacttgaaaaagtggcaccgagtcggtgctttt

SEQ ID NO: 1043 - RNA, 100 nt, synthetic construct
  misc_feature 1..100: note = Synthetic
  source 1..100: mol_type = other RNA
aatgaatgccggggacagaggttttagagctagaaatagcaagttaaaataaggctagtccgttatcaacttgaaaaagtggcaccgagtcggtgctttt

SEQ ID NO: 1044 - RNA, 100 nt, synthetic construct
  misc_feature 1..100: note = Synthetic
  source 1..100: mol_type = other RNA
atgaatgccggggacagagagttttagagctagaaatagcaagttaaaataaggctagtccgttatcaacttgaaaaagtggcaccgagtcggtgctttt

SEQ ID NO: 1045 - RNA, 100 nt, synthetic construct
  misc_feature 1..100: note = Synthetic
  source 1..100: mol_type = other RNA
tgccggggacagagaggggcgttttagagctagaaatagcaagttaaaataaggctagtccgttatcaacttgaaaaagtggcaccgagtcggtgctttt

SEQ ID NO: 1046 - RNA, 100 nt, synthetic construct
  misc_feature 1..100: note = Synthetic
  source 1..100: mol_type = other RNA
aacctgcccctctctgtcccgttttagagctagaaatagcaagttaaaataaggctagtccgttatcaacttgaaaaagtggcaccgagtcggtgctttt

SEQ ID NO: 1047 - RNA, 100 nt, synthetic construct
  misc_feature 1..100: note = Synthetic
  source 1..100: mol_type = other RNA
acagagaggggcaggttgacgttttagagctagaaatagcaagttaaaataaggctagtccgttatcaacttgaaaaagtggcaccgagtcggtgctttt

SEQ ID NO: 1048 - RNA, 100 nt, synthetic construct
  misc_feature 1..100: note = Synthetic
  source 1..100: mol_type = other RNA
cagagaggggcaggttgaccgttttagagctagaaatagcaagttaaaataaggctagtccgttatcaacttgaaaaagtggcaccgagtcggtgctttt

SEQ ID NO: 1049 - RNA, 100 nt, synthetic construct
  misc_feature 1..100: note = Synthetic
  source 1..100: mol_type = other RNA
cgatcacggctttgaagtccgttttagagctagaaatagcaagttaaaataaggctagtccgttatcaacttgaaaaagtggcaccgagtcggtgctttt

SEQ ID NO: 1050 - RNA, 100 nt, synthetic construct
  misc_feature 1..100: note = Synthetic
  source 1..100: mol_type = other RNA
gttctcgatattcacgatcagttttagagctagaaatagcaagttaaaataaggctagtccgttatcaacttgaaaaagtggcaccgagtcggtgctttt

SEQ ID NO: 1051 - RNA, 100 nt, synthetic construct
  misc_feature 1..100: note = Synthetic
  source 1..100: mol_type = other RNA
ggcggacataaagacgacaagttttagagctagaaatagcaagttaaaataaggctagtccgttatcaacttgaaaaagtggcaccgagtcggtgctttt

SEQ ID NO: 1052 - RNA, 100 nt, synthetic construct
  misc_feature 1..100: note = Synthetic
  source 1..100: mol_type = other RNA
aagtggaagcactaggtggggttttagagctagaaatagcaagttaaaataaggctagtccgttatcaacttgaaaaagtggcaccgagtcggtgctttt

SEQ ID NO: 1053 - RNA, 100 nt, synthetic construct
  misc_feature 1..100: note = Synthetic
  source 1..100: mol_type = other RNA
tagaagtggaagcactaggtgttttagagctagaaatagcaagttaaaataaggctagtccgttatcaacttgaaaaagtggcaccgagtcggtgctttt

SEQ ID NO: 1054 - RNA, 100 nt, synthetic construct
  misc_feature 1..100: note = Synthetic
  source 1..100: mol_type = other RNA
atagaagtggaagcactagggttttagagctagaaatagcaagttaaaataaggctagtccgttatcaacttgaaaaagtggcaccgagtcggtgctttt

SEQ ID NO: 1055 - RNA, 100 nt, synthetic construct
  misc_feature 1..100: note = Synthetic
  source 1..100: mol_type = other RNA
tgcatagaagtggaagcactgttttagagctagaaatagcaagttaaaataaggctagtccgttatcaacttgaaaaagtggcaccgagtcggtgctttt

SEQ ID NO: 1056 - RNA, 100 nt, synthetic construct
  misc_feature 1..100: note = Synthetic
  source 1..100: mol_type = other RNA
tggaggcatttgcatagaaggttttagagctagaaatagcaagttaaaataaggctagtccgttatcaacttgaaaaagtggcaccgagtcggtgctttt

SEQ ID NO: 1057 - RNA, 100 nt, synthetic construct
  misc_feature 1..100: note = Synthetic
  source 1..100: mol_type = other RNA
tggggaagtgaatggcttgggttttagagctagaaatagcaagttaaaataaggctagtccgttatcaacttgaaaaagtggcaccgagtcggtgctttt

SEQ ID NO: 1058 - RNA, 100 nt, synthetic construct
  misc_feature 1..100: note = Synthetic
  source 1..100: mol_type = other RNA
gattggggaagtgaatggctgttttagagctagaaatagcaagttaaaataaggctagtccgttatcaacttgaaaaagtggcaccgagtcggtgctttt

SEQ ID NO: 1059 - RNA, 100 nt, synthetic construct
  misc_feature 1..100: note = Synthetic
  source 1..100: mol_type = other RNA
gacaagattggggaagtgaagttttagagctagaaatagcaagttaaaataaggctagtccgttatcaacttgaaaaagtggcaccgagtcggtgctttt

SEQ ID NO: 1060 - RNA, 100 nt, synthetic construct
  misc_feature 1..100: note = Synthetic
  source 1..100: mol_type = other RNA
ttccccaatcttgtcgttgagttttagagctagaaatagcaagttaaaataaggctagtccgttatcaacttgaaaaagtggcaccgagtcggtgctttt

SEQ ID NO: 1061 - RNA, 100 nt, synthetic construct
  misc_feature 1..100: note = Synthetic
  source 1..100: mol_type = other RNA
tccccaatcttgtcgttgatgttttagagctagaaatagcaagttaaaataaggctagtccgttatcaacttgaaaaagtggcaccgagtcggtgctttt

SEQ ID NO: 1062 - RNA, 100 nt, synthetic construct
  misc_feature 1..100: note = Synthetic
  source 1..100: mol_type = other RNA
acccatcaacgacaagattggttttagagctagaaatagcaagttaaaataaggctagtccgttatcaacttgaaaaagtggcaccgagtcggtgctttt

SEQ ID NO: 1063 - RNA, 100 nt, synthetic construct
  misc_feature 1..100: note = Synthetic
  source 1..100: mol_type = other RNA
tacccatcaacgacaagattgttttagagctagaaatagcaagttaaaataaggctagtccgttatcaacttgaaaaagtggcaccgagtcggtgctttt

SEQ ID NO: 1064 - RNA, 100 nt, synthetic construct
  misc_feature 1..100: note = Synthetic
  source 1..100: mol_type = other RNA
gtatgtgtttaaaacatgcagttttagagctagaaatagcaagttaaaataaggctagtccgttatcaacttgaaaaagtggcaccgagtcggtgctttt

SEQ ID NO: 1065 - RNA, 100 nt, synthetic construct
  misc_feature 1..100: note = Synthetic
  source 1..100: mol_type = other RNA
tgtttaaaacatgcacggtggttttagagctagaaatagcaagttaaaataaggctagtccgttatcaacttgaaaaagtggcaccgagtcggtgctttt

SEQ ID NO: 1066 - RNA, 100 nt, synthetic construct
  misc_feature 1..100: note = Synthetic
  source 1..100: mol_type = other RNA
taaaacatgcacggtgaggcgttttagagctagaaatagcaagttaaaataaggctagtccgttatcaacttgaaaaagtggcaccgagtcggtgctttt

SEQ ID NO: 1067 - RNA, 100 nt, synthetic construct
  misc_feature 1..100: note = Synthetic
  source 1..100: mol_type = other RNA
aaaacatgcacggtgaggccgttttagagctagaaatagcaagttaaaataaggctagtccgttatcaacttgaaaaagtggcaccgagtcggtgctttt

SEQ ID NO: 1068 - RNA, 100 nt, synthetic construct
  misc_feature 1..100: note = Synthetic
  source 1..100: mol_type = other RNA
ggctgctgatgcaccatgcagttttagagctagaaatagcaagttaaaataaggctagtccgttatcaacttgaaaaagtggcaccgagtcggtgctttt

SEQ ID NO: 1069 - RNA, 100 nt, synthetic construct
  misc_feature 1..100: note = Synthetic
  source 1..100: mol_type = other RNA
catggtgcatcagcagcccagttttagagctagaaatagcaagttaaaataaggctagtccgttatcaacttgaaaaagtggcaccgagtcggtgctttt

SEQ ID NO: 1070 - RNA, 100 nt, synthetic construct
  misc_feature 1..100: note = Synthetic
  source 1..100: mol_type = other RNA
catcagcagcccatggcctcgttttagagctagaaatagcaagttaaaataaggctagtccgttatcaacttgaaaaagtggcaccgagtcggtgctttt

SEQ ID NO: 1071 - RNA, 100 nt, synthetic construct
  misc_feature 1..100: note = Synthetic
  source 1..100: mol_type = other RNA
catgcctggccagaggccatgttttagagctagaaatagcaagttaaaataaggctagtccgttatcaacttgaaaaagtggcaccgagtcggtgctttt

SEQ ID NO: 1072 - RNA, 100 nt, synthetic construct
  misc_feature 1..100: note = Synthetic
  source 1..100: mol_type = other RNA
gcctctggccaggcatggcggttttagagctagaaatagcaagttaaaataaggctagtccgttatcaacttgaaaaagtggcaccgagtcggtgctttt

SEQ ID NO: 1073 - RNA, 100 nt, synthetic construct
  misc_feature 1..100: note = Synthetic
  source 1..100: mol_type = other RNA
gcctcgccatgcctggccaggttttagagctagaaatagcaagttaaaataaggctagtccgttatcaacttgaaaaagtggcaccgagtcggtgctttt

SEQ ID NO: 1074 - RNA, 100 nt, synthetic construct
  misc_feature 1..100: note = Synthetic
  source 1..100: mol_type = other RNA
catctcttaaaaaatgaattgttttagagctagaaatagcaagttaaaataaggctagtccgttatcaacttgaaaaagtggcaccgagtcggtgctttt

SEQ ID NO: 1075 - RNA, 100 nt, synthetic construct
  misc_feature 1..100: note = Synthetic
  source 1..100: mol_type = other RNA
aaatgaatttggccagacacgttttagagctagaaatagcaagttaaaataaggctagtccgttatcaacttgaaaaagtggcaccgagtcggtgctttt

SEQ ID NO: 1076 - RNA, 100 nt, synthetic construct
  misc_feature 1..100: note = Synthetic
  source 1..100: mol_type = other RNA
tatagttgtatttctgaaatgttttagagctagaaatagcaagttaaaataaggctagtccgttatcaacttgaaaaagtggcaccgagtcggtgctttt

SEQ ID NO: 1077 - RNA, 100 nt, synthetic construct
  misc_feature 1..100: note = Synthetic
  source 1..100: mol_type = other RNA
ctccagtctggatcgtttgagttttagagctagaaatagcaagttaaaataaggctagtccgttatcaacttgaaaaagtggcaccgagtcggtgctttt

SEQ ID NO: 1078 - RNA, 100 nt, synthetic construct
  misc_feature 1..100: note = Synthetic
  source 1..100: mol_type = other RNA
tccagtctggatcgtttgacgttttagagctagaaatagcaagttaaaataaggctagtccgttatcaacttgaaaaagtggcaccgagtcggtgctttt

SEQ ID NO: 1079 - RNA, 100 nt, synthetic construct
  misc_feature 1..100: note = Synthetic
  source 1..100: mol_type = other RNA
cgtcaaacgatccagactgggttttagagctagaaatagcaagttaaaataaggctagtccgttatcaacttgaaaaagtggcaccgagtcggtgctttt

SEQ ID NO: 1080 - RNA, 100 nt, synthetic construct
  misc_feature 1..100: note = Synthetic
  source 1..100: mol_type = other RNA
tcccgtcaaacgatccagacgttttagagctagaaatagcaagttaaaataaggctagtccgttatcaacttgaaaaagtggcaccgagtcggtgctttt

SEQ ID NO: 1081 - RNA, 100 nt, synthetic construct
  misc_feature 1..100: note = Synthetic
  source 1..100: mol_type = other RNA
ggatcgtttgacgggacttcgttttagagctagaaatagcaagttaaaataaggctagtccgttatcaacttgaaaaagtggcaccgagtcggtgctttt

SEQ ID NO: 1082 - RNA, 100 nt, synthetic construct
  misc_feature 1..100: note = Synthetic
  source 1..100: mol_type = other RNA
acatcagtgcaacagtaacagttttagagctagaaatagcaagttaaaataaggctagtccgttatcaacttgaaaaagtggcaccgagtcggtgctttt

SEQ ID NO: 1083 - RNA, 100 nt, synthetic construct
  misc_feature 1..100: note = Synthetic
  source 1..100: mol_type = other RNA
ggaggctgtcactgtctctcgttttagagctagaaatagcaagttaaaataaggctagtccgttatcaacttgaaaaagtggcaccgagtcggtgctttt

SEQ ID NO: 1084 - RNA, 100 nt, synthetic construct
  misc_feature 1..100: note = Synthetic
  source 1..100: mol_type = other RNA
ttcacgcgggagtctgacgggttttagagctagaaatagcaagttaaaataaggctagtccgttatcaacttgaaaaagtggcaccgagtcggtgctttt

SEQ ID NO: 1085 - RNA, 100 nt, synthetic construct
  misc_feature 1..100: note = Synthetic
  source 1..100: mol_type = other RNA
atcttcacgcgggagtctgagttttagagctagaaatagcaagttaaaataaggctagtccgttatcaacttgaaaaagtggcaccgagtcggtgctttt

SEQ ID NO: 1086 - RNA, 100 nt, synthetic construct
  misc_feature 1..100: note = Synthetic
  source 1..100: mol_type = other RNA
tcccgcgtgaagatgtcacagttttagagctagaaatagcaagttaaaataaggctagtccgttatcaacttgaaaaagtggcaccgagtcggtgctttt

SEQ ID NO: 1087 - RNA, 100 nt, synthetic construct
  misc_feature 1..100: note = Synthetic
  source 1..100: mol_type = other RNA
cccgcgtgaagatgtcacaagttttagagctagaaatagcaagttaaaataaggctagtccgttatcaacttgaaaaagtggcaccgagtcggtgctttt

SEQ ID NO: 1088 - RNA, 100 nt, synthetic construct
  misc_feature 1..100: note = Synthetic
  source 1..100: mol_type = other RNA
cccttgtgacatcttcacgcgttttagagctagaaatagcaagttaaaataaggctagtccgttatcaacttgaaaaagtggcaccgagtcggtgctttt

SEQ ID NO: 1089 - RNA, 100 nt, synthetic construct
  misc_feature 1..100: note = Synthetic
  source 1..100: mol_type = other RNA
tcccttgtgacatcttcacggttttagagctagaaatagcaagttaaaataaggctagtccgttatcaacttgaaaaagtggcaccgagtcggtgctttt

SEQ ID NO: 1090 - RNA, 100 nt, synthetic construct
  misc_feature 1..100: note = Synthetic
  source 1..100: mol_type = other RNA
gtgaagatgtcacaagggatgttttagagctagaaatagcaagttaaaataaggctagtccgttatcaacttgaaaaagtggcaccgagtcggtgctttt

SEQ ID NO: 1091 - RNA, 100 nt, synthetic construct
  misc_feature 1..100: note = Synthetic
  source 1..100: mol_type = other RNA
agggattggcaattgtccccgttttagagctagaaatagcaagttaaaataaggctagtccgttatcaacttgaaaaagtggcaccgagtcggtgctttt

SEQ ID NO: 1092 - RNA, 100 nt, synthetic construct
  misc_feature 1..100: note = Synthetic
  source 1..100: mol_type = other RNA
gggattggcaattgtccccagttttagagctagaaatagcaagttaaaataaggctagtccgttatcaacttgaaaaagtggcaccgagtcggtgctttt

SEQ ID NO: 1093 - RNA, 100 nt, synthetic construct
  misc_feature 1..100: note = Synthetic
  source 1..100: mol_type = other RNA
gacacagtgttttgtccctggttttagagctagaaatagcaagttaaaataaggctagtccgttatcaacttgaaaaagtggcaccgagtcggtgctttt

SEQ ID NO: 1094 - RNA, 100 nt, synthetic construct
  misc_feature 1..100: note = Synthetic
  source 1..100: mol_type = other RNA
ggacacagtgttttgtccctgttttagagctagaaatagcaagttaaaataaggctagtccgttatcaacttgaaaaagtggcaccgagtcggtgctttt

SEQ ID NO: 1095 - RNA, 100 nt, synthetic construct
  misc_feature 1..100: note = Synthetic
  source 1..100: mol_type = other RNA
gggacacagtgttttgtcccgttttagagctagaaatagcaagttaaaataaggctagtccgttatcaacttgaaaaagtggcaccgagtcggtgctttt

SEQ ID NO: 1096 - RNA, 100 nt, synthetic construct
  misc_feature 1..100: note = Synthetic
  source 1..100: mol_type = other RNA
cactgtgtcccccccagtgcgttttagagctagaaatagcaagttaaaataaggctagtccgttatcaacttgaaaaagtggcaccgagtcggtgctttt

SEQ ID NO: 1097 - RNA, 100 nt, synthetic construct
  misc_feature 1..100: note = Synthetic
  source 1..100: mol_type = other RNA
actgtgtcccccccagtgcagttttagagctagaaatagcaagttaaaataaggctagtccgttatcaacttgaaaaagtggcaccgagtcggtgctttt

SEQ ID NO: 1098 - RNA, 100 nt, synthetic construct
  misc_feature 1..100: note = Synthetic
  source 1..100: mol_type = other RNA
cacggttccctgcactgggggttttagagctagaaatagcaagttaaaataaggctagtccgttatcaacttgaaaaagtggcaccgagtcggtgctttt

SEQ ID NO: 1099 - RNA, 100 nt, synthetic construct
  misc_feature 1..100: note = Synthetic
  source 1..100: mol_type = other RNA
tcacggttccctgcactggggttttagagctagaaatagcaagttaaaataaggctagtccgttatcaacttgaaaaagtggcaccgagtcggtgctttt

SEQ ID NO: 1100 - RNA, 100 nt, synthetic construct
  misc_feature 1..100: note = Synthetic
  source 1..100: mol_type = other RNA
atcacggttccctgcactgggttttagagctagaaatagcaagttaaaataaggctagtccgttatcaacttgaaaaagtggcaccgagtcggtgctttt

SEQ ID NO: 1101 - RNA, 100 nt, synthetic construct
  misc_feature 1..100: note = Synthetic
  source 1..100: mol_type = other RNA
tatcacggttccctgcactggttttagagctagaaatagcaagttaaaataaggctagtccgttatcaacttgaaaaagtggcaccgagtcggtgctttt

SEQ ID NO: 1102 - RNA, 100 nt, synthetic construct
  misc_feature 1..100: note = Synthetic
  source 1..100: mol_type = other RNA
ttatcacggttccctgcactgttttagagctagaaatagcaagttaaaataaggctagtccgttatcaacttgaaaaagtggcaccgagtcggtgctttt

SEQ ID NO: 1103 - RNA, 100 nt, synthetic construct
  misc_feature 1..100: note = Synthetic
  source 1..100: mol_type = other RNA
cttatcacggttccctgcacgttttagagctagaaatagcaagttaaaataaggctagtccgttatcaacttgaaaaagtggcaccgagtcggtgctttt

SEQ ID NO: 1104 - RNA, 100 nt, synthetic construct
  misc_feature 1..100: note = Synthetic
  source 1..100: mol_type = other RNA
ggaaccgtgataagcctttcgttttagagctagaaatagcaagttaaaataaggctagtccgttatcaacttgaaaaagtggcaccgagtcggtgctttt

SEQ ID NO: 1105 - RNA, 100 nt, synthetic construct
  misc_feature 1..100: note = Synthetic
  source 1..100: mol_type = other RNA
gtgataagcctttctggtttgttttagagctagaaatagcaagttaaaataaggctagtccgttatcaacttgaaaaagtggcaccgagtcggtgctttt

SEQ ID NO: 1106 - RNA, 100 nt, synthetic construct
  misc_feature 1..100: note = Synthetic
  source 1..100: mol_type = other RNA
gaaaccagaaaggcttatcagttttagagctagaaatagcaagttaaaataaggctagtccgttatcaacttgaaaaagtggcaccgagtcggtgctttt

SEQ ID NO: 1107 - RNA, 100 nt, synthetic construct
  misc_feature 1..100: note = Synthetic
  source 1..100: mol_type = other RNA
tacgtgctccgaaaccagaagttttagagctagaaatagcaagttaaaataaggctagtccgttatcaacttgaaaaagtggcaccgagtcggtgctttt

SEQ ID NO: 1108 - RNA, 100 nt, synthetic construct
  misc_feature 1..100: note = Synthetic
  source 1..100: mol_type = other RNA
atgcgtccctgtacagataggttttagagctagaaatagcaagttaaaataaggctagtccgttatcaacttgaaaaagtggcaccgagtcggtgctttt

SEQ ID NO: 1109 - RNA, 100 nt, synthetic construct
  misc_feature 1..100: note = Synthetic
  source 1..100: mol_type = other RNA
tgcgtccctgtacagatagtgttttagagctagaaatagcaagttaaaataaggctagtccgttatcaacttgaaaaagtggcaccgagtcggtgctttt

SEQ ID NO: 1110 - RNA, 100 nt, synthetic construct
  misc_feature 1..100: note = Synthetic
  source 1..100: mol_type = other RNA
gcgtccctgtacagatagtggttttagagctagaaatagcaagttaaaataaggctagtccgttatcaacttgaaaaagtggcaccgagtcggtgctttt

SEQ ID NO: 1111 - RNA, 100 nt, synthetic construct
  misc_feature 1..100: note = Synthetic
  source 1..100: mol_type = other RNA
aaatccccactatctgtacagttttagagctagaaatagcaagttaaaataaggctagtccgttatcaacttgaaaaagtggcaccgagtcggtgctttt

SEQ ID NO: 1112 - RNA, 100 nt, synthetic construct
  misc_feature 1..100: note = Synthetic
  source 1..100: mol_type = other RNA
aaaatccccactatctgtacgttttagagctagaaatagcaagttaaaataaggctagtccgttatcaacttgaaaaagtggcaccgagtcggtgctttt

SEQ ID NO: 1113 - RNA, 100 nt, synthetic construct
  misc_feature 1..100: note = Synthetic
  source 1..100: mol_type = other RNA
tatgtttgcactttgtatatgttttagagctagaaatagcaagttaaaataaggctagtccgttatcaacttgaaaaagtggcaccgagtcggtgctttt

SEQ ID NO: 1114 - RNA, 100 nt, synthetic construct
  misc_feature 1..100: note = Synthetic
  source 1..100: mol_type = other RNA
ctatttatttttgcaaacccgttttagagctagaaatagcaagttaaaataaggctagtccgttatcaacttgaaaaagtggcaccgagtcggtgctttt

SEQ ID NO: 1115 - RNA, 100 nt, synthetic construct
  misc_feature 1..100: note = Synthetic
  source 1..100: mol_type = other RNA
ctgaacaaatacagcaaccagttttagagctagaaatagcaagttaaaataaggctagtccgttatcaacttgaaaaagtggcaccgagtcggtgctttt

SEQ ID NO: 1116 - RNA, 100 nt, synthetic construct
  misc_feature 1..100: note = Synthetic
  source 1..100: mol_type = other RNA
actgaacaaatacagcaaccgttttagagctagaaatagcaagttaaaataaggctagtccgttatcaacttgaaaaagtggcaccgagtcggtgctttt

SEQ ID NO: 1117 - RNA, 100 nt, synthetic construct
  misc_feature 1..100: note = Synthetic
  source 1..100: mol_type = other RNA
atttgttcagtgactattctgttttagagctagaaatagcaagttaaaataaggctagtccgttatcaacttgaaaaagtggcaccgagtcggtgctttt

SEQ ID NO: 1118 - RNA, 100 nt, synthetic construct
  misc_feature 1..100: note = Synthetic
  source 1..100: mol_type = other RNA
tttgttcagtgactattctcgttttagagctagaaatagcaagttaaaataaggctagtccgttatcaacttgaaaaagtggcaccgagtcggtgctttt

SEQ ID NO: 1119 - RNA, 100 nt, synthetic construct
  misc_feature 1..100: note = Synthetic
  source 1..100: mol_type = other RNA
ttgttcagtgactattctcggttttagagctagaaatagcaagttaaaataaggctagtccgttatcaacttgaaaaagtggcaccgagtcggtgctttt

SEQ ID NO: 1120 - RNA, 100 nt, synthetic construct
  misc_feature 1..100: note = Synthetic
  source 1..100: mol_type = other RNA
ctattctcggggccctgtgtgttttagagctagaaatagcaagttaaaataaggctagtccgttatcaacttgaaaaagtggcaccgagtcggtgctttt

SEQ ID NO: 1121 - RNA, 100 nt, synthetic construct
  misc_feature 1..100: note = Synthetic
  source 1..100: mol_type = other RNA
tattctcggggccctgtgtagttttagagctagaaatagcaagttaaaataaggctagtccgttatcaacttgaaaaagtggcaccgagtcggtgctttt

SEQ ID NO: 1122 - RNA, 100 nt, synthetic construct
  misc_feature 1..100: note = Synthetic
  source 1..100: mol_type = other RNA
attctcggggccctgtgtaggttttagagctagaaatagcaagttaaaataaggctagtccgttatcaacttgaaaaagtggcaccgagtcggtgctttt

SEQ ID NO: 1123 - RNA, 100 nt, synthetic construct
  misc_feature 1..100: note = Synthetic
  source 1..100: mol_type = other RNA
ttctcggggccctgtgtagggttttagagctagaaatagcaagttaaaataaggctagtccgttatcaacttgaaaaagtggcaccgagtcggtgctttt

SEQ ID NO: 1124 - RNA, 100 nt, synthetic construct
  misc_feature 1..100: note = Synthetic
  source 1..100: mol_type = other RNA
aggcaataaccccctacacagttttagagctagaaatagcaagttaaaataaggctagtccgttatcaacttgaaaaagtggcaccgagtcggtgctttt

SEQ ID NO: 1125 - RNA, 100 nt, synthetic construct
  misc_feature 1..100: note = Synthetic
  source 1..100: mol_type = other RNA
gaggcaataaccccctacacgttttagagctagaaatagcaagttaaaataaggctagtccgttatcaacttgaaaaagtggcaccgagtcggtgctttt

SEQ ID NO: 1126 - RNA, 100 nt, synthetic construct
  misc_feature 1..100: note = Synthetic
  source 1..100: mol_type = other RNA
ataaagaagaggcatttcaggttttagagctagaaatagcaagttaaaataaggctagtccgttatcaacttgaaaaagtggcaccgagtcggtgctttt

SEQ ID NO: 1127 - RNA, 100 nt, synthetic construct
  misc_feature 1..100: note = Synthetic
  source 1..100: mol_type = other RNA
aatctttgtacataaagaaggttttagagctagaaatagcaagttaaaataaggctagtccgttatcaacttgaaaaagtggcaccgagtcggtgctttt

SEQ ID NO: 1128 - RNA, 100 nt, synthetic construct
  misc_feature 1..100: note = Synthetic
  source 1..100: mol_type = other RNA
caaagattatttgcacgaacgttttagagctagaaatagcaagttaaaataaggctagtccgttatcaacttgaaaaagtggcaccgagtcggtgctttt

SEQ ID NO: 1129 - RNA, 100 nt, synthetic construct
  misc_feature 1..100: note = Synthetic
  source 1..100: mol_type = other RNA
ggactgtgtgcaacgcttttgttttagagctagaaatagcaagttaaaataaggctagtccgttatcaacttgaaaaagtggcaccgagtcggtgctttt

SEQ ID NO: 1130 - RNA, 100 nt, synthetic construct
  misc_feature 1..100: note = Synthetic
  source 1..100: mol_type = other RNA
gactgtgtgcaacgctttttgttttagagctagaaatagcaagttaaaataaggctagtccgttatcaacttgaaaaagtggcaccgagtcggtgctttt

SEQ ID NO: 1131 - RNA, 100 nt, synthetic construct
  misc_feature 1..100: note = Synthetic
  source 1..100: mol_type = other RNA
gtccccgttgtatgtatgaggttttagagctagaaatagcaagttaaaataaggctagtccgttatcaacttgaaaaagtggcaccgagtcggtgctttt

SEQ ID NO: 1132 - RNA, 100 nt, synthetic construct
  misc_feature 1..100: note = Synthetic
  source 1..100: mol_type = other RNA
agccactcatacatacaacggttttagagctagaaatagcaagttaaaataaggctagtccgttatcaacttgaaaaagtggcaccgagtcggtgctttt

SEQ ID NO: 1133 - RNA, 100 nt, synthetic construct
  misc_feature 1..100: note = Synthetic
  source 1..100: mol_type = other RNA
aagccactcatacatacaacgttttagagctagaaatagcaagttaaaataaggctagtccgttatcaacttgaaaaagtggcaccgagtcggtgctttt

SEQ ID NO: 1134 - RNA, 100 nt, synthetic construct
  misc_feature 1..100: note = Synthetic
  source 1..100: mol_type = other RNA
gaagccactcatacatacaagttttagagctagaaatagcaagttaaaataaggctagtccgttatcaacttgaaaaagtggcaccgagtcggtgctttt

SEQ ID NO: 1135 - RNA, 100 nt, synthetic construct
  misc_feature 1..100: note = Synthetic
  source 1..100: mol_type = other RNA
ttgtatgtatgagtggcttcgttttagagctagaaatagcaagttaaaataaggctagtccgttatcaacttgaaaaagtggcaccgagtcggtgctttt

SEQ ID NO: 1136 - RNA, 100 nt, synthetic construct
  misc_feature 1..100: note = Synthetic
  source 1..100: mol_type = other RNA
tgtatgtatgagtggcttctgttttagagctagaaatagcaagttaaaataaggctagtccgttatcaacttgaaaaagtggcaccgagtcggtgctttt

SEQ ID NO: 1137 - RNA, 100 nt, synthetic construct
  misc_feature 1..100: note = Synthetic
  source 1..100: mol_type = other RNA
tatgagtggcttctgggagagttttagagctagaaatagcaagttaaaataaggctagtccgttatcaacttgaaaaagtggcaccgagtcggtgctttt

SEQ ID NO: 1138 - RNA, 100 nt, synthetic construct
  misc_feature 1..100: note = Synthetic
  source 1..100: mol_type = other RNA
atgagtggcttctgggagatgttttagagctagaaatagcaagttaaaataaggctagtccgttatcaacttgaaaaagtggcaccgagtcggtgctttt

SEQ ID NO: 1139 - RNA, 100 nt, synthetic construct
  misc_feature 1..100: note = Synthetic
  source 1..100: mol_type = other RNA
tacaaaaaccttctatacaggttttagagctagaaatagcaagttaaaataaggctagtccgttatcaacttgaaaaagtggcaccgagtcggtgctttt

SEQ ID NO: 1140 - RNA, 100 nt, synthetic construct
  misc_feature 1..100: note = Synthetic
  source 1..100: mol_type = other RNA
ttgatcacagtaagacattcgttttagagctagaaatagcaagttaaaataaggctagtccgttatcaacttgaaaaagtggcaccgagtcggtgctttt

SEQ ID NO: 1141 - RNA, 100 nt, synthetic construct
  misc_feature 1..100: note = Synthetic
  source 1..100: mol_type = other RNA
tgcatcgagtttagacaaatgttttagagctagaaatagcaagttaaaataaggctagtccgttatcaacttgaaaaagtggcaccgagtcggtgctttt

SEQ ID NO: 1142 - RNA, 100 nt, synthetic construct
  misc_feature 1..100: note = Synthetic
  source 1..100: mol_type = other RNA
ttagcgttggccacccgcgggttttagagctagaaatagcaagttaaaataaggctagtccgttatcaacttgaaaaagtggcaccgagtcggtgctttt

SEQ ID NO: 1143 - RNA, 100 nt, synthetic construct
  misc_feature 1..100: note = Synthetic
  source 1..100: mol_type = other RNA
aaattagcgttggccacccggttttagagctagaaatagcaagttaaaataaggctagtccgttatcaacttgaaaaagtggcaccgagtcggtgctttt

SEQ ID NO: 1144 - RNA, 41 nt, synthetic construct
  misc_feature 1..41: note = Synthetic
  source 1..41: mol_type = other RNA
taatttctactcttgtagataataaaacaaggccggcgagg

SEQ ID NO: 1145 - RNA, 41 nt, synthetic construct
  misc_feature 1..41: note = Synthetic
  source 1..41: mol_type = other RNA
taatttctactcttgtagatttcatctgggaggcagaacag

SEQ ID NO: 1146 - RNA, 41 nt, synthetic construct
  misc_feature 1..41: note = Synthetic
  source 1..41: mol_type = other RNA
taatttctactcttgtagatgtttcttcctttcctcgtgaa

SEQ ID NO: 1147 - RNA, 41 nt, synthetic construct
  misc_feature 1..41: note = Synthetic
  source 1..41: mol_type = other RNA
taatttctactcttgtagatttcctttcctcgtgaaggata

SEQ ID NO: 1148 - RNA, 41 nt, synthetic construct
  misc_feature 1..41: note = Synthetic
  source 1..41: mol_type = other RNA
taatttctactcttgtagattcttatccttcacgaggaaag

SEQ ID NO: 1149 - RNA, 41 nt, synthetic construct
  misc_feature 1..41: note = Synthetic
  source 1..41: mol_type = other RNA
taatttctactcttgtagatagtttctctccaccgtgacac

SEQ ID NO: 1150 - RNA, 41 nt, synthetic construct
  misc_feature 1..41: note = Synthetic
  source 1..41: mol_type = other RNA
taatttctactcttgtagataggattgtgtcacggtggaga

SEQ ID NO: 1151 - RNA, 41 nt, synthetic construct
  misc_feature 1..41: note = Synthetic
  source 1..41: mol_type = other RNA
taatttctactcttgtagattctccaccgtgacacaatcct

SEQ ID NO: 1152 - RNA, 41 nt, synthetic construct
  misc_feature 1..41: note = Synthetic
  source 1..41: mol_type = other RNA
taatttctactcttgtagatatcttccatgtttgaggattg

SEQ ID NO: 1153 - RNA, 41 nt, synthetic construct
  misc_feature 1..41: note = Synthetic
  source 1..41: mol_type = other RNA
taatttctactcttgtagataacacacaacagcagatggca

SEQ ID NO: 1154 - RNA, 41 nt, synthetic construct
  misc_feature 1..41: note = Synthetic
  source 1..41: mol_type = other RNA
taatttctactcttgtagatcctcttctatgcaagccttgc

SEQ ID NO: 1155 - RNA, 41 nt, synthetic construct
  misc_feature 1..41: note = Synthetic
  source 1..41: mol_type = other RNA
taatttctactcttgtagatgaggtgggtttgtaccttcct

SEQ ID NO: 1156 - RNA, 41 nt, synthetic construct
  misc_feature 1..41: note = Synthetic
  source 1..41: mol_type = other RNA
taatttctactcttgtagatctggcttaaggaaggtacaaa

SEQ ID NO: 1157 - RNA, 41 nt, synthetic construct
  misc_feature 1..41: note = Synthetic
  source 1..41: mol_type = other RNA
taatttctactcttgtagatcgacgccatgaatccctttcc

SEQ ID NO: 1158 - RNA, 41 nt, synthetic construct
  misc_feature 1..41: note = Synthetic
  source 1..41: mol_type = other RNA
taatttctactcttgtagatgtctcggtgccaccacggatt

SEQ ID NO: 1159 - RNA, 41 nt, synthetic construct
  misc_feature 1..41: note = Synthetic
  source 1..41: mol_type = other RNA
taatttctactcttgtagatgtgaatgagtttggtctcggt

SEQ ID NO: 1160 - RNA, 41 nt, synthetic construct
  misc_feature 1..41: note = Synthetic
  source 1..41: mol_type = other RNA
taatttctactcttgtagatttaagtgcctgagacacccgg

SEQ ID NO: 1161 - RNA, 41 nt, synthetic construct
  misc_feature 1..41: note = Synthetic
  source 1..41: mol_type = other RNA
taatttctactcttgtagattcagttcagagttgtacactg

SEQ ID NO: 1162 - RNA, 41 nt, synthetic construct
  misc_feature 1..41: note = Synthetic
  source 1..41: mol_type = other RNA
taatttctactcttgtagatcactgttttctgtcgtgtgtg

SEQ ID NO: 1163 - RNA, 41 nt, synthetic construct
  misc_feature 1..41: note = Synthetic
  source 1..41: mol_type = other RNA
taatttctactcttgtagataagtcccggtcaacctgcccc

SEQ ID NO: 1164 - RNA, 41 nt, synthetic construct
  misc_feature 1..41: note = Synthetic
  source 1..41: mol_type = other RNA
taatttctactcttgtagattgtccgcccacctagtgcttc

SEQ ID NO: 1165 - RNA, 41 nt, synthetic construct
  misc_feature 1..41: note = Synthetic
  source 1..41: mol_type = other RNA
taatttctactcttgtagatcatagaagtggaagcactagg

SEQ ID NO: 1166 - RNA, 41 nt, synthetic construct
  misc_feature 1..41: note = Synthetic
  source 1..41: mol_type = other RNA
taatttctactcttgtagataacacatacccatcaacgaca

SEQ ID NO: 1167 - RNA, 41 nt, synthetic construct
  misc_feature 1..41: note = Synthetic
  source 1..41: mol_type = other RNA
taatttctactcttgtagataaacatgcacggtgaggccgg

SEQ ID NO: 1168 - RNA, 41 nt, synthetic construct
  misc_feature 1..41: note = Synthetic
  source 1..41: mol_type = other RNA
taatttctactcttgtagatacgggacttcaggttctttct

SEQ ID NO: 1169 - RNA, 41 nt, synthetic construct
  misc_feature 1..41: note = Synthetic
  source 1..41: mol_type = other RNA
taatttctactcttgtagatagaaagaacctgaagtcccgt

SEQ ID NO: 1170 - RNA, 41 nt, synthetic construct
  misc_feature 1..41: note = Synthetic
  source 1..41: mol_type = other RNA
taatttctactcttgtagattgaaatcgccgtgttactgtt

SEQ ID NO: 1171 - RNA, 41 nt, synthetic construct
  misc_feature 1..41: note = Synthetic
  source 1..41: mol_type = other RNA
taatttctactcttgtagattccctggggacaattgccaat

SEQ ID NO: 1172 - RNA, 41 nt, synthetic construct
  misc_feature 1..41: note = Synthetic
  source 1..41: mol_type = other RNA
taatttctactcttgtagatcgtgctccgaaaccagaaagg

SEQ ID NO: 1173 - RNA, 41 nt, synthetic construct
  misc_feature 1..41: note = Synthetic
  source 1..41: mol_type = other RNA
taatttctactcttgtagattggtttcggagcacgtaaatg

SEQ ID NO: 1174 - RNA, 41 nt, synthetic construct
  misc_feature 1..41: note = Synthetic
  source 1..41: mol_type = other RNA
taatttctactcttgtagatggagcacgtaaatgcgtccct

SEQ ID NO: 1175 - RNA, 41 nt, synthetic construct
  misc_feature 1..41: note = Synthetic
  source 1..41: mol_type = other RNA
taatttctactcttgtagataaccaatatacaaagtgcaaa

SEQ ID NO: 1176 - RNA, 41 nt, synthetic construct
  misc_feature 1..41: note = Synthetic
  source 1..41: mol_type = other RNA
taatttctactcttgtagatcactttgtatattggttgaaa

SEQ ID NO: 1177 - RNA, 41 nt, synthetic construct
  misc_feature 1..41: note = Synthetic
  source 1..41: mol_type = other RNA
taatttctactcttgtagattatattggttgaaactgttat

SEQ ID NO: 1178 - RNA, 41 nt, synthetic construct
  misc_feature 1..41: note = Synthetic
  source 1..41: mol_type = other RNA
taatttctactcttgtagattttttgcaaaccctggttgct

SEQ ID NO: 1179 - RNA, 41 nt, synthetic construct
  misc_feature 1..41: note = Synthetic
  source 1..41: mol_type = other RNA
taatttctactcttgtagatcaaaccctggttgctgtattt

SEQ ID NO: 1180 - RNA, 41 nt, synthetic construct
  misc_feature 1..41: note = Synthetic
  source 1..41: mol_type = other RNA
taatttctactcttgtagatagaggcaataaccccctacac

SEQ ID NO: 1181 - RNA, 41 nt, synthetic construct
  misc_feature 1..41: note = Synthetic
  source 1..41: mol_type = other RNA
taatttctactcttgtagattacataaagaagaggcatttc

SEQ ID NO: 1182 - RNA, 41 nt, synthetic construct
  misc_feature 1..41: note = Synthetic
  source 1..41: mol_type = other RNA
taatttctactcttgtagattgtacaaagattatttgcacg

SEQ ID NO: 1183 - RNA, 41 nt, synthetic construct
  misc_feature 1..41: note = Synthetic
  source 1..41: mol_type = other RNA
taatttctactcttgtagatcacgaactggactgtgtgcaa

SEQ ID NO: 1184 - RNA, 41 nt, synthetic construct
  misc_feature 1..41: note = Synthetic
  source 1..41: mol_type = other RNA
taatttctactcttgtagatggagaatgatgtccccgttgt

SEQ ID NO: 1185 - RNA, 41 nt, synthetic construct
  misc_feature 1..41: note = Synthetic
  source 1..41: mol_type = other RNA
taatttctactcttgtagataaccactgtatagaaggtttt

SEQ ID NO: 1186 - RNA, 41 nt, synthetic construct
  misc_feature 1..41: note = Synthetic
  source 1..41: mol_type = other RNA
taatttctactcttgtagattagcctgaatgtcttactgtg

SEQ ID NO: 1187 - RNA, 41 nt, synthetic construct
  misc_feature 1..41: note = Synthetic
  source 1..41: mol_type = other RNA
taatttctactcttgtagatattgatcacagtaagacattc

SEQ ID NO: 1188 - RNA, 41 nt, synthetic construct
  misc_feature 1..41: note = Synthetic
  source 1..41: mol_type = other RNA
taatttctactcttgtagatagaaatttaattgatcacagt

SEQ ID NO: 1189 - RNA, 41 nt, synthetic construct
  misc_feature 1..41: note = Synthetic
  source 1..41: mol_type = other RNA
taatttctactcttgtagatgacaaattggttcatttaaga

SEQ ID NO: 1190 - RNA, 41 nt, synthetic construct
  misc_feature 1..41: note = Synthetic
  source 1..41: mol_type = other RNA
taatttctactcttgtagatttaaatgaaccaatttgtcta

SEQ ID NO: 1191 - RNA, 41 nt, synthetic construct
  misc_feature 1..41: note = Synthetic
  source 1..41: mol_type = other RNA
taatttctactcttgtagattctaaactcgatgcacgttct

SEQ ID NO: 1192 - RNA, 41 nt, synthetic construct
  misc_feature 1..41: note = Synthetic
  source 1..41: mol_type = other RNA
taatttctactcttgtagattggattggactccccaggaga

SEQ ID NO: 1193 - RNA, 41 nt, synthetic construct
  misc_feature 1..41: note = Synthetic
  source 1..41: mol_type = other RNA
taatttctactcttgtagattcaagtcccctgctcatccat

SEQ ID NO: 1194 - RNA, 41 nt, synthetic construct
  misc_feature 1..41: note = Synthetic
  source 1..41: mol_type = other RNA
taatttctactcttgtagattcgagtgtatgaatggatgag

SEQ ID NO: 1195 - RNA, 41 nt, synthetic construct
  misc_feature 1..41: note = Synthetic
  source 1..41: mol_type = other RNA
taatttctactcttgtagatttatatcccctgtagtgtccc

SEQ ID NO: 1196 - RNA, 41 nt, synthetic construct
  misc_feature 1..41: note = Synthetic
  source 1..41: mol_type = other RNA
taatttctactcttgtagatatttcttatatcccctgtagt

SEQ ID NO: 1197 - RNA, 41 nt, synthetic construct
  misc_feature 1..41: note = Synthetic
  source 1..41: mol_type = other RNA
taatttctactcttgtagatttcagggggagtttctctaat

SEQ ID NO: 1198 - RNA, 41 nt, synthetic construct
  misc_feature 1..41: note = Synthetic
  source 1..41: mol_type = other RNA
taatttctactcttgtagattggtgcagtcacctgccagca

SEQ ID NO: 1199 - RNA, 41 nt, synthetic construct
  misc_feature 1..41: note = Synthetic
  source 1..41: mol_type = other RNA
taatttctactcttgtagattggtggtggcgctttctgctg

SEQ ID NO: 1200 - RNA, 41 nt, synthetic construct
  misc_feature 1..41: note = Synthetic
  source 1..41: mol_type = other RNA
taatttctactcttgtagatcctcctatgagtttctggctc

SEQ ID NO: 1201 - RNA, 41 nt, synthetic construct
  misc_feature 1..41: note = Synthetic
  source 1..41: mol_type = other RNA
taatttctactcttgtagattggacctaaccaccccagtgt

SEQ ID NO: 1202 - RNA, 41 nt, synthetic construct
  misc_feature 1..41: note = Synthetic
  source 1..41: mol_type = other RNA
taatttctactcttgtagatggcagatgttcacgccacgtc

SEQ ID NO: 1203 - RNA, 41 nt, synthetic construct
  misc_feature 1..41: note = Synthetic
  source 1..41: mol_type = other RNA
taatttctactcttgtagattgagacctcgccggccttgtt

SEQ ID NO: 1204 - RNA, 41 nt, synthetic construct
  misc_feature 1..41: note = Synthetic
  source 1..41: mol_type = other RNA
taatttctactcttgtagattctgggaggcagaacaggctt

SEQ ID NO: 1205 - RNA, 41 nt, synthetic construct
  misc_feature 1..41: note = Synthetic
  source 1..41: mol_type = other RNA
taatttctactcttgtagataagcctgttctgcctcccaga

SEQ ID NO: 1206 - RNA, 41 nt, synthetic construct
  misc_feature 1..41: note = Synthetic
  source 1..41: mol_type = other RNA
taatttctactcttgtagatcgaggaaaggaagaaaccaaa

SEQ ID NO: 1207 - RNA, 41 nt, synthetic construct
  misc_feature 1..41: note = Synthetic
  source 1..41: mol_type = other RNA
taatttctactcttgtagattttcctcgtgaaggataagag

SEQ ID NO: 1208 - RNA, 41 nt, synthetic construct
  misc_feature 1..41: note = Synthetic
  source 1..41: mol_type = other RNA
taatttctactcttgtagatcccgggcctgtttctcttatc

SEQ ID NO: 1209 - RNA, 41 nt, synthetic construct
  misc_feature 1..41: note = Synthetic
  source 1..41: mol_type = other RNA
taatttctactcttgtagatggaagttttgagtttctctcc

SEQ ID NO: 1210 - RNA, 41 nt, synthetic construct
  misc_feature 1..41: note = Synthetic
  source 1..41: mol_type = other RNA
taatttctactcttgtagatccgtgacacaatcctcaaaca

SEQ ID NO: 1211 - RNA, 41 nt, synthetic construct
  misc_feature 1..41: note = Synthetic
  source 1..41: mol_type = other RNA
taatttctactcttgtagattgtttgaggattgtgtcacgg

SEQ ID NO: 1212 - RNA, 41 nt, synthetic construct
  misc_feature 1..41: note = Synthetic
  source 1..41: mol_type = other RNA
taatttctactcttgtagatatgtttgaggattgtgtcacg

SEQ ID NO: 1213 - RNA, 41 nt, synthetic construct
  misc_feature 1..41: note = Synthetic
  source 1..41: mol_type = other RNA
taatttctactcttgtagattcttccatgtttgaggattgt

SEQ ID NO: 1214 - RNA, 41 nt, synthetic construct
  misc_feature 1..41: note = Synthetic
  source 1..41: mol_type = other RNA
taatttctactcttgtagatctttcatcttccatgtttgag

SEQ ID NO: 1215 - RNA, 41 nt, synthetic construct
  misc_feature 1..41: note = Synthetic
  source 1..41: mol_type = other RNA
taatttctactcttgtagatacacacaacagcagatggcac

SEQ ID NO: 1216 - RNA, 41 nt, synthetic construct
  misc_feature 1..41: note = Synthetic
  source 1..41: mol_type = other RNA
taatttctactcttgtagatgttggtgccatctgctgttgt

SEQ ID NO: 1217 - RNA, 41 nt, synthetic construct
  misc_feature 1..41: note = Synthetic
  source 1..41: mol_type = other RNA
taatttctactcttgtagattggcttaaggaaggtacaaac

SEQ ID NO: 1218 - RNA, 41 nt, synthetic construct
  misc_feature 1..41: note = Synthetic
  source 1..41: mol_type = other RNA
taatttctactcttgtagatttaagccaggaaagggattca

SEQ ID NO: 1219 - RNA, 41 nt, synthetic construct
  misc_feature 1..41: note = Synthetic
  source 1..41: mol_type = other RNA
taatttctactcttgtagatacgccatgaatccctttcctg

SEQ ID NO: 1220 - RNA, 41 nt, synthetic construct
  misc_feature 1..41: note = Synthetic
  source 1..41: mol_type = other RNA
taatttctactcttgtagatgacgccatgaatccctttcct

SEQ ID NO: 1221 - RNA, 41 nt, synthetic construct
  misc_feature 1..41: note = Synthetic
  source 1..41: mol_type = other RNA
taatttctactcttgtagattggcgtcggaaatgatctggc

SEQ ID NO: 1222 - RNA, 41 nt, synthetic construct
  misc_feature 1..41: note = Synthetic
  source 1..41: mol_type = other RNA
taatttctactcttgtagatgccagatcatttccgacgcca

SEQ ID NO: 1223 - RNA, 41 nt, synthetic construct
  misc_feature 1..41: note = Synthetic
  source 1..41: mol_type = other RNA
taatttctactcttgtagattggtggcaccgagaccaaact

SEQ ID NO: 1224 - RNA, 41 nt, synthetic construct
  misc_feature 1..41: note = Synthetic
  source 1..41: mol_type = other RNA
taatttctactcttgtagatccaaatgatgccacttcccag

SEQ ID NO: 1225 - RNA, 41 nt, synthetic construct
  misc_feature 1..41: note = Synthetic
  source 1..41: mol_type = other RNA
taatttctactcttgtagatattcccgtggtctccttgcac

SEQ ID NO: 1226 - RNA, 41 nt, synthetic construct
  misc_feature 1..41: note = Synthetic
  source 1..41: mol_type = other RNA
taatttctactcttgtagatttcccgtggtctccttgcact

SEQ ID NO: 1227 - RNA, 41 nt, synthetic construct
  misc_feature 1..41: note = Synthetic
  source 1..41: mol_type = other RNA
taatttctactcttgtagatcgtggtctccttgcactttct

SEQ ID NO: 1228 - RNA, 41 nt, synthetic construct
  misc_feature 1..41: note = Synthetic
  source 1..41: mol_type = other RNA
taatttctactcttgtagatgagttgtacactgtgtacatt

SEQ ID NO: 1229 - RNA, 41 nt, synthetic construct
  misc_feature 1..41: note = Synthetic
  source 1..41: mol_type = other RNA
taatttctactcttgtagatatcccaacacacacgacagaa

SEQ ID NO: 1230 - RNA, 41 nt, synthetic construct
  misc_feature 1..41: note = Synthetic
  source 1..41: mol_type = other RNA
taatttctactcttgtagattggcctgggatcccatcccaa

SEQ ID NO: 1231 - RNA, 41 nt, synthetic construct
  misc_feature 1..41: note = Synthetic
  source 1..41: mol_type = other RNA
taatttctactcttgtagataggccagggaaagcccgtgtc

SEQ ID NO: 1232 - RNA, 41 nt, synthetic construct
  misc_feature 1..41: note = Synthetic
  source 1..41: mol_type = other RNA
taatttctactcttgtagatttgacacgggctttccctggc

SEQ ID NO: 1233 - RNA, 41 nt, synthetic construct
  misc_feature 1..41: note = Synthetic
  source 1..41: mol_type = other RNA
taatttctactcttgtagatcggcattcattgacacgggct

SEQ ID NO: 1234 - RNA, 41 nt, synthetic construct
  misc_feature 1..41: note = Synthetic
  source 1..41: mol_type = other RNA
taatttctactcttgtagatggtcaacctgcccctctctgt

SEQ ID NO: 1235 - RNA, 41 nt, synthetic construct
  misc_feature 1..41: note = Synthetic
  source 1..41: mol_type = other RNA
taatttctactcttgtagatcgatcacggctttgaagtccc

SEQ ID NO: 1236 - RNA, 41 nt, synthetic construct
  misc_feature 1..41: note = Synthetic
  source 1..41: mol_type = other RNA
taatttctactcttgtagataagccgtgatcgtgaatatcg

SEQ ID NO: 1237 - RNA, 41 nt, synthetic construct
  misc_feature 1..41: note = Synthetic
  source 1..41: mol_type = other RNA
taatttctactcttgtagatcccacctagtgcttccacttc

SEQ ID NO: 1238 - RNA, 41 nt, synthetic construct
  misc_feature 1..41: note = Synthetic
  source 1..41: mol_type = other RNA
taatttctactcttgtagatacttctatgcaaatgcctcca

SEQ ID NO: 1239 - RNA, 41 nt, synthetic construct
  misc_feature 1..41: note = Synthetic
  source 1..41: mol_type = other RNA
taatttctactcttgtagatcttctatgcaaatgcctccaa

SEQ ID NO: 1240 - RNA, 41 nt, synthetic construct
  misc_feature 1..41: note = Synthetic
  source 1..41: mol_type = other RNA
taatttctactcttgtagatcttccccaatcttgtcgttga

SEQ ID NO: 1241 - RNA, 41 nt, synthetic construct
  misc_feature 1..41: note = Synthetic
  source 1..41: mol_type = other RNA
taatttctactcttgtagatgtctggatcgtttgacgggac

SEQ ID NO: 1242 - RNA, 41 nt, synthetic construct
  misc_feature 1..41: note = Synthetic
  source 1..41: mol_type = other RNA
taatttctactcttgtagatgaaagaacctgaagtcccgtc

SEQ ID NO: 1243 - RNA, 41 nt, synthetic construct
  misc_feature 1..41: note = Synthetic
  source 1..41: mol_type = other RNA
taatttctactcttgtagatggttctttctgaaatcgccgt

SEQ ID NO: 1244 - RNA, 41 nt, synthetic construct
  misc_feature 1..41: note = Synthetic
  source 1..41: mol_type = other RNA
taatttctactcttgtagatgagagacagtgacagcctccg

SEQ ID NO: 1245 - RNA, 41 nt, synthetic construct
  misc_feature 1..41: note = Synthetic
  source 1..41: mol_type = other RNA
taatttctactcttgtagatcgcgggagtctgacggaggct

SEQ ID NO: 1246 - RNA, 41 nt, synthetic construct
  misc_feature 1..41: note = Synthetic
  source 1..41: mol_type = other RNA
taatttctactcttgtagattcagactcccgcgtgaagatg

SEQ ID NO: 1247 - RNA, 41 nt, synthetic construct
  misc_feature 1..41: note = Synthetic
  source 1..41: mol_type = other RNA
taatttctactcttgtagatttgtgacatcttcacgcggga

SEQ ID NO: 1248 - RNA, 41 nt, synthetic construct
  misc_feature 1..41: note = Synthetic
  source 1..41: mol_type = other RNA
taatttctactcttgtagatgcgtgaagatgtcacaaggga

SEQ ID NO: 1249 - RNA, 41 nt, synthetic construct
  misc_feature 1..41: note = Synthetic
  source 1..41: mol_type = other RNA
taatttctactcttgtagattggggacaattgccaatccct

SEQ ID NO: 1250 - RNA, 41 nt, synthetic construct
  misc_feature 1..41: note = Synthetic
  source 1..41: mol_type = other RNA
taatttctactcttgtagatcagggacaaaacactgtgtcc

SEQ ID NO: 1251 - RNA, 41 nt, synthetic construct
  misc_feature 1..41: note = Synthetic
  source 1..41: mol_type = other RNA
taatttctactcttgtagattgcactgggggggacacagtg

SEQ ID NO: 1252 - RNA, 41 nt, synthetic construct
  misc_feature 1..41: note = Synthetic
  source 1..41: mol_type = other RNA
taatttctactcttgtagatctgcactgggggggacacagt

SEQ ID NO: 1253 - RNA, 41 nt, synthetic construct
  misc_feature 1..41: note = Synthetic
  source 1..41: mol_type = other RNA
taatttctactcttgtagatccccagtgcagggaaccgtga

SEQ ID NO: 1254 - RNA, 41 nt, synthetic construct
  misc_feature 1..41: note = Synthetic
  source 1..41: mol_type = other RNA
taatttctactcttgtagataaaccagaaaggcttatcacg

SEQ ID NO: 1255 - RNA, 41 nt, synthetic construct
  misc_feature 1..41: note = Synthetic
  source 1..41: mol_type = other RNA
taatttctactcttgtagatgagcacgtaaatgcgtccctg

SEQ ID NO: 1256 - RNA, 41 nt, synthetic construct
  misc_feature 1..41: note = Synthetic
  source 1..41: mol_type = other RNA
taatttctactcttgtagatcactatctgtacagggacgca

SEQ ID NO: 1257 - RNA, 41 nt, synthetic construct
  misc_feature 1..41: note = Synthetic
  source 1..41: mol_type = other RNA
taatttctactcttgtagattgtacagatagtggggatttt

SEQ ID NO: 1258 - RNA, 41 nt, synthetic construct
  misc_feature 1..41: note = Synthetic
  source 1..41: mol_type = other RNA
taatttctactcttgtagatgtgactattctcggggccctg

SEQ ID NO: 1259 - RNA, 41 nt, synthetic construct
  misc_feature 1..41: note = Synthetic
  source 1..41: mol_type = other RNA
taatttctactcttgtagatgaggcaataaccccctacaca

SEQ ID NO: 1260 - RNA, 41 nt, synthetic construct
  misc_feature 1..41: note = Synthetic
  source 1..41: mol_type = other RNA
taatttctactcttgtagatgttcgtgcaaataatctttgt

SEQ ID NO: 1261 - RNA, 41 nt, synthetic construct
  misc_feature 1..41: note = Synthetic
  source 1..41: mol_type = other RNA
taatttctactcttgtagataaaaagcgttgcacacagtcc

SEQ ID NO: 1262 - RNA, 41 nt, synthetic construct
  misc_feature 1..41: note = Synthetic
  source 1..41: mol_type = other RNA
taatttctactcttgtagatcgttgtatgtatgagtggctt

SEQ ID NO: 1263 - RNA, 41 nt, synthetic construct
  misc_feature 1..41: note = Synthetic
  source 1..41: mol_type = other RNA
taatttctactcttgtagatggctacaaaaaccttctatac

SEQ ID NO: 1264 - RNA, 41 nt, synthetic construct
  misc_feature 1..41: note = Synthetic
  source 1..41: mol_type = other RNA
taatttctactcttgtagattttaagaaatttaattgatca

SEQ ID NO: 1265 - RNA, 41 nt, synthetic construct
  misc_feature 1..41: note = Synthetic
  source 1..41: mol_type = other RNA
taatttctactcttgtagatagaactccgggcaagatgcaa

SEQ ID NO: 1266 - RNA, 41 nt, synthetic construct
  misc_feature 1..41: note = Synthetic
  source 1..41: mol_type = other RNA
taatttctactcttgtagatggcaagatgcaatctccgtgg

SEQ ID NO: 1267 - RNA, 41 nt, synthetic construct
  misc_feature 1..41: note = Synthetic
  source 1..41: mol_type = other RNA
taatttctactcttgtagatactcagagaagcgacagcaga

SEQ ID NO: 1268 - RNA, 41 nt, synthetic construct
  misc_feature 1..41: note = Synthetic
  source 1..41: mol_type = other RNA
taatttctactcttgtagatctgctcatccattcatacact

SEQ ID NO: 1269 - RNA, 41 nt, synthetic construct
  misc_feature 1..41: note = Synthetic
  source 1..41: mol_type = other RNA
taatttctactcttgtagatttcatacactcgacaaatatc

SEQ ID NO: 1270 - RNA, 41 nt, synthetic construct
  misc_feature 1..41: note = Synthetic
  source 1..41: mol_type = other RNA
taatttctactcttgtagattacactcgacaaatatctgtt

SEQ ID NO: 1271 - RNA, 41 nt, synthetic construct
  misc_feature 1..41: note = Synthetic
  source 1..41: mol_type = other RNA
taatttctactcttgtagatacaagcctacggcagagcatg

SEQ ID NO: 1272 - RNA, 41 nt, synthetic construct
  misc_feature 1..41: note = Synthetic
  source 1..41: mol_type = other RNA
taatttctactcttgtagatctgtagtgtcccacaagccta

SEQ ID NO: 1273 - RNA, 41 nt, synthetic construct
  misc_feature 1..41: note = Synthetic
  source 1..41: mol_type = other RNA
taatttctactcttgtagatgggggagtttctctaatgaag

SEQ ID NO: 1274 - RNA, 41 nt, synthetic construct
  misc_feature 1..41: note = Synthetic
  source 1..41: mol_type = other RNA
taatttctactcttgtagatttagagaaactccccctgaag

SEQ ID NO: 1275 - RNA, 41 nt, synthetic construct
  misc_feature 1..41: note = Synthetic
  source 1..41: mol_type = other RNA
taatttctactcttgtagattgccagttgcttttctgtccc

SEQ ID NO: 1276 - RNA, 41 nt, synthetic construct
  misc_feature 1..41: note = Synthetic
  source 1..41: mol_type = other RNA
taatttctactcttgtagatagattaaacagggggacggtg

SEQ ID NO: 1277 - RNA, 41 nt, synthetic construct
  misc_feature 1..41: note = Synthetic
  source 1..41: mol_type = other RNA
taatttctactcttgtagattctcctggttttgtggtggtg

SEQ ID NO: 1278 - RNA, 41 nt, synthetic construct
  misc_feature 1..41: note = Synthetic
  source 1..41: mol_type = other RNA
taatttctactcttgtagataggctccagaaaccacatctt

SEQ ID NO: 1279 - RNA, 41 nt, synthetic construct
  misc_feature 1..41: note = Synthetic
  source 1..41: mol_type = other RNA
taatttctactcttgtagatctcctatgagtttctggctct

SEQ ID NO: 1280 - RNA, 41 nt, synthetic construct
  misc_feature 1..41: note = Synthetic
  source 1..41: mol_type = other RNA
taatttctactcttgtagatcgcctcgctctgctggggacc

SEQ ID NO: 1281 - RNA, 41 nt, synthetic construct
  misc_feature 1..41: note = Synthetic
  source 1..41: mol_type = other RNA
taatttctactcttgtagatccgcctcgctctgctggggac

SEQ ID NO: 1282 - RNA, 41 nt, synthetic construct
  misc_feature 1..41: note = Synthetic
  source 1..41: mol_type = other RNA
taatttctactcttgtagatccgctccaggctctatctccc

SEQ ID NO: 1283 - RNA, 41 nt, synthetic construct
  misc_feature 1..41: note = Synthetic
  source 1..41: mol_type = other RNA
taatttctactcttgtagatggctctatctcccaccagtgc

SEQ ID NO: 1284 - RNA, 41 nt, synthetic construct
  misc_feature 1..41: note = Synthetic
  source 1..41: mol_type = other RNA
taatttctactcttgtagattgttgggctcagcccgtggga

SEQ ID NO: 1285 - RNA, 41 nt, synthetic construct
  misc_feature 1..41: note = Synthetic
  source 1..41: mol_type = other RNA
taatttctactcttgtagatacgggctgagcccaacaggga

SEQ ID NO: 1286 - RNA, 41 nt, synthetic construct
  misc_feature 1..41: note = Synthetic
  source 1..41: mol_type = other RNA
taatttctactcttgtagattcagcctgtccctgttgggct

SEQ ID NO: 1287 - RNA, 41 nt, synthetic construct
  misc_feature 1..41: note = Synthetic
  source 1..41: mol_type = other RNA
taatttctactcttgtagatatccacccagtaaggcaccat

SEQ ID NO: 1288 - RNA, 41 nt, synthetic construct
  misc_feature 1..41: note = Synthetic
  source 1..41: mol_type = other RNA
taatttctactcttgtagattaaaacaaagctctggcaggc

SEQ ID NO: 1289 - RNA, 41 nt, synthetic construct
  misc_feature 1..41: note = Synthetic
  source 1..41: mol_type = other RNA
taatttctactcttgtagatcaagccttgctagacagccag

SEQ ID NO: 1290 - RNA, 41 nt, synthetic construct
  misc_feature 1..41: note = Synthetic
  source 1..41: mol_type = other RNA
taatttctactcttgtagatgagaactgccattgtcgtctt

SEQ ID NO: 1291 - RNA, 41 nt, synthetic construct
  misc_feature 1..41: note = Synthetic
  source 1..41: mol_type = other RNA
taatttctactcttgtagattccgcccacctagtgcttcca

SEQ ID NO: 1292 - RNA, 41 nt, synthetic construct
  misc_feature 1..41: note = Synthetic
  source 1..41: mol_type = other RNA
taatttctactcttgtagatcaaatgcctccaagccattca

SEQ ID NO: 1293 - RNA, 41 nt, synthetic construct
  misc_feature 1..41: note = Synthetic
  source 1..41: mol_type = other RNA
taatttctactcttgtagattgtttaaaacatgcacggtga

SEQ ID NO: 1294 - RNA, 41 nt, synthetic construct
  misc_feature 1..41: note = Synthetic
  source 1..41: mol_type = other RNA
taatttctactcttgtagatgttgtatttctgaaatagggt

SEQ ID NO: 1295 - RNA, 41 nt, synthetic construct
  misc_feature 1..41: note = Synthetic
  source 1..41: mol_type = other RNA
taatttctactcttgtagatacggttccctgcactgggggg

SEQ ID NO: 1296 - RNA, 41 nt, synthetic construct
  misc_feature 1..41: note = Synthetic
  source 1..41: mol_type = other RNA
taatttctactcttgtagattgtacagggacgcatttacgt

SEQ ID NO: 1297 - RNA, 41 nt, synthetic construct
  misc_feature 1..41: note = Synthetic
  source 1..41: mol_type = other RNA
taatttctactcttgtagattttgcactttgtatattggtt

SEQ ID NO: 1298 - RNA, 41 nt, synthetic construct
  misc_feature 1..41: note = Synthetic
  source 1..41: mol_type = other RNA
taatttctactcttgtagatttggttgaaactgttatcact

SEQ ID NO: 1299 - RNA, 41 nt, synthetic construct
  misc_feature 1..41: note = Synthetic
  source 1..41: mol_type = other RNA
taatttctactcttgtagatagtgataacagtttcaaccaa

SEQ ID NO: 1300 - RNA, 41 nt, synthetic construct
  misc_feature 1..41: note = Synthetic
  source 1..41: mol_type = other RNA
taatttctactcttgtagattaagtgataacagtttcaacc

SEQ ID NO: 1301 - RNA, 41 nt, synthetic construct
  misc_feature 1..41: note = Synthetic
  source 1..41: mol_type = other RNA
taatttctactcttgtagattataagtgataacagtttcaa

SEQ ID NO: 1302 - RNA, 41 nt, synthetic construct
  misc_feature 1..41: note = Synthetic
  source 1..41: mol_type = other RNA
taatttctactcttgtagattatataagtgataacagtttc

SEQ ID NO: 1303 - RNA, 41 nt, synthetic construct
  misc_feature 1..41: note = Synthetic
  source 1..41: mol_type = other RNA
taatttctactcttgtagattatatataagtgataacagtt

SEQ ID NO: 1304 - RNA, 41 nt, synthetic construct
  misc_feature 1..41: note = Synthetic
  source 1..41: mol_type = other RNA
taatttctactcttgtagattacaaagattatttgcacgaa

SEQ ID NO: 1305 - RNA, 41 nt, synthetic construct
  misc_feature 1..41: note = Synthetic
  source 1..41: mol_type = other RNA
taatttctactcttgtagattatgagtggcttctgggagat

SEQ ID NO: 1306 - RNA, 41 nt, synthetic construct
  misc_feature 1..41: note = Synthetic
  source 1..41: mol_type = other RNA
taatttctactcttgtagatagtggcttctgggagatgggt

SEQ ID NO: 1307 - RNA, 41 nt, synthetic construct
  misc_feature 1..41: note = Synthetic
  source 1..41: mol_type = other RNA
taatttctactcttgtagatcagtggtttaaaaagtgacac

SEQ ID NO: 1308 - RNA, 41 nt, synthetic construct
  misc_feature 1..41: note = Synthetic
  source 1..41: mol_type = other RNA
taatttctactcttgtagatgaaggtttttgtagcctgaat

SEQ ID NO: 1309 - RNA, 41 nt, synthetic construct
  misc_feature 1..41: note = Synthetic
  source 1..41: mol_type = other RNA
taatttctactcttgtagataatggatgagcaggggacttg

SEQ ID NO: 1310 - RNA, 41 nt, synthetic construct
  misc_feature 1..41: note = Synthetic
  source 1..41: mol_type = other RNA
taatttctactcttgtagattgttgagtgctaagtgcgaac

SEQ ID NO: 1311 - RNA, 41 nt, synthetic construct
  misc_feature 1..41: note = Synthetic
  source 1..41: mol_type = other RNA
taatttctactcttgtagatccctgtagtgtcccacaagcc

SEQ ID NO: 1312 - RNA, 41 nt, synthetic construct
  misc_feature 1..41: note = Synthetic
  source 1..41: mol_type = other RNA
taatttctactcttgtagattcccctgtagtgtcccacaag

SEQ ID NO: 1313 - RNA, 41 nt, synthetic construct
  misc_feature 1..41: note = Synthetic
  source 1..41: mol_type = other RNA
taatttctactcttgtagatgggacagaaaagcaactggca

SEQ ID NO: 1314 - RNA, 41 nt, synthetic construct
  misc_feature 1..41: note = Synthetic
  source 1..41: mol_type = other RNA
taatttctactcttgtagatgtgcagtcacctgccagcata

SEQ ID NO: 1315 - RNA, 41 nt, synthetic construct
  misc_feature 1..41: note = Synthetic
  source 1..41: mol_type = other RNA
taatttctactcttgtagatctggcaggtgactgcaccata

SEQ ID NO: 1316 - RNA, 41 nt, synthetic construct
  misc_feature 1..41: note = Synthetic
  source 1..41: mol_type = other RNA
taatttctactcttgtagatagtttctggctctcaccagct

SEQ ID NO: 1317 - DNA, 20 bp, Homo sapiens
  source 1..20: mol_type = genomic DNA
ttgaaattcgaattctgcct

SEQ ID NO: 1318 - DNA, 20 bp, Homo sapiens
  source 1..20: mol_type = genomic DNA
gtgcgttgctttgagtgggt

SEQ ID NO: 1319 - DNA, 21 bp, Homo sapiens
  source 1..21: mol_type = genomic DNA
ttgtctggggacagaaaaggc

SEQ ID NO: 1320 - DNA, 21 bp, Homo sapiens
  source 1..21: mol_type = genomic DNA
gcttccaaggaaatgaagatg

SEQ ID NO: 1321 - DNA, 21 bp, Homo sapiens
  source 1..21: mol_type = genomic DNA
aatgggctgatctcaggcctg

SEQ ID NO: 1322 - DNA, 21 bp, Homo sapiens
  source 1..21: mol_type = genomic DNA
aaagcagttcccacccactca

SEQ ID NO: 1323 - DNA, 21 bp, Homo sapiens
  source 1..21: mol_type = genomic DNA
agtgggtgggaactgctttga

SEQ ID NO: 1324 - RNA, 20 nt, synthetic construct
  misc_feature 1..20: note = Synthetic
  source 1..20: mol_type = other RNA
ttgaaattcgaattctgcct

SEQ ID NO: 1325 - RNA, 20 nt, synthetic construct
  misc_feature 1..20: note = Synthetic
  source 1..20: mol_type = other RNA
gtgcgttgctttgagtgggt

SEQ ID NO: 1326 - RNA, 21 nt, synthetic construct
  misc_feature 1..21: note = Synthetic
  source 1..21: mol_type = other RNA
ttgtctggggacagaaaaggc

SEQ ID NO: 1327 - RNA, 21 nt, synthetic construct
  misc_feature 1..21: note = Synthetic
  source 1..21: mol_type = other RNA
gcttccaaggaaatgaagatg

SEQ ID NO: 1328 - RNA, 21 nt, synthetic construct
  misc_feature 1..21: note = Synthetic
  source 1..21: mol_type = other RNA
aatgggctgatctcaggcctg

SEQ ID NO: 1329 - RNA, 21 nt, synthetic construct
  misc_feature 1..21: note = Synthetic
  source 1..21: mol_type = other RNA
aaagcagttcccacccactca

SEQ ID NO: 1330 - RNA, 21 nt, synthetic construct
  misc_feature 1..21: note = Synthetic
  source 1..21: mol_type = other RNA
agtgggtgggaactgctttga

SEQ ID NO: 1331 - RNA, 100 nt, synthetic construct
  misc_feature 1..100: note = Synthetic
  source 1..100: mol_type = other RNA
ttgaaattcgaattctgcctgttttagagctagaaatagcaagttaaaataaggctagtccgttatcaacttgaaaaagtggcaccgagtcggtgctttt

SEQ ID NO: 1332 - RNA, 100 nt, synthetic construct
  misc_feature 1..100: note = Synthetic
  source 1..100: mol_type = other RNA
gtgcgttgctttgagtgggtgttttagagctagaaatagcaagttaaaataaggctagtccgttatcaacttgaaaaagtggcaccgagtcggtgctttt

SEQ ID NO: 1333 - RNA, 41 nt, synthetic construct
  misc_feature 1..41: note = Synthetic
  source 1..41: mol_type = other RNA
taatttctactcttgtagatttgtctggggacagaaaaggc

SEQ ID NO: 1334 - RNA, 41 nt, synthetic construct
  misc_feature 1..41: note = Synthetic
  source 1..41: mol_type = other RNA
taatttctactcttgtagatgcttccaaggaaatgaagatg

SEQ ID NO: 1335 - RNA, 41 nt, synthetic construct
  misc_feature 1..41: note = Synthetic
  source 1..41: mol_type = other RNA
taatttctactcttgtagataatgggctgatctcaggcctg

SEQ ID NO: 1336 - RNA, 41 nt, synthetic construct
  misc_feature 1..41: note = Synthetic
  source 1..41: mol_type = other RNA
taatttctactcttgtagataaagcagttcccacccactca

SEQ ID NO: 1337 - RNA, 41 nt, synthetic construct
  misc_feature 1..41: note = Synthetic
  source 1..41: mol_type = other RNA
taatttctactcttgtagatagtgggtgggaactgctttga

SEQ ID NO: 1338 - protein, 1368 aa, Streptococcus pyogenes [sequence omitted]

SEQ ID NO: 1339 - protein, 1414 aa, synthetic construct
  REGION 1..1414: note = Synthetic
MAPKKKRKVGIHGVPAADKKYSIGLDIGTNSVGWAVITDEYKVPSKKFKVLGNTDRHSIKKNLIGALLFDSGETAEATRLKRTARRRYTRRKNRICYLQEIFSNEMAKVDDSFFHRLEESFLVEEDKKHERHPIFGNIVDEVAYHEKYPTIYHLRKKLVDSTDKADLRLIYLALAHMIKFRGHFLIEGDLNPDNSDVDKLFIQLVQTYNQLFEENPINASGVDAKAILSARLSKSRRLENLIAQLPGEKKNGLFGNLIALSLGLTPNFKSNFDLAEDAKLQLSKDTYDDDLDNLLAQIGDQYADLFLAAKNLSDAILLSDILRVNTEITKAPLSASMIKRYDEHHQDLTLLKALVRQQLPEKYKEIFFDQSKNGYAGYIDGGASQEEFYKFIKPILEKMDGTEELLVKLNREDLLRKQRTFDNGSIPHQIHLGELHAILRRQEDFYPFLKDNREKIEKILTFRIPYYVGPLARGNSRFAWMTRKSEETITPWNFEEVVDKGASAQSFIERMTNFDKNLPNEKVLPKHSLLYEYFTVYNELTKVKYVTEGMRKPAFLSGEQKKAIVDLLFKTNRKVTVKQLKEDYFKKIECFDSVEISGVEDRFNASLGTYHDLLKIIKDKDFLDNEENEDILEDIVLTLTLFEDREMIEERLKTYAHLFDDKVMKQLKRRRYTGWGRLSRKLINGIRDKQSGKTILDFLKSDGFANRNFMQLIHDDSLTFKEDIQKAQVSGQGDSLHEHIANLAGSPAIKKGILQTVKVVDELVKVMGRHKPENIVIEMARENQTTQKGQKNSRERMKRIEEGIKELGSQILKEHPVENTQLQNEKLYLYYLQNGRDMYVDQELDINRLSDYDVDHIVPQSFLKDDSIDNKVLTRSDKNRGKSDNVPSEEVVKKMKNYWRQLLNAKLITQRKFDNLTKAERGGLSELDKAGFIKRQLVETRQITKHVAQILDSRMNTKYDENDKLIREVKVITLKSKLVSDFRKDFQFYKVREINNYHHAHDAYLNAVVGTALIKKYPKLESEFVYGDYKVYDVRKMIAKSEQEIGKATAKYFFYSNIMNFFKTEITLANGEIRKRPLIETNGETGEIVWDKGRDFATVRKVLSMPQVNIVKKTEVQTGGFSKESILPKRNSDKLIARKKDWDPKKYGGFDSPTVAYSVLVVAKVEKGKSKKLKSVKELLGITIMERSSFEKNPIDFLEAKGYKEVKKDLIIKLPKYSLFELENGRKRMLASAGELQKGNELALPSKYVNFLYLASHYEKLKGSPEDNEQKQLFVEQHKHYLDEIIEQISEFSKRVILADANLDKVLSAYNKHRDKPIREQAENIIHLFTLTNLGAPAAFKYFDTTIDRKRYTSTKEVLDATLIHQSITGLYETRIDLSQLGGDSGGKRPAATKKAGQAKKKKGSYPYDVPDYA

SEQ ID NO: 1340 - protein, 1379 aa, synthetic construct
  REGION 1..1379: note = Synthetic
MDKKYSIGLDIGTNSVGWAVITDEYKVPSKKFKVLGNTDRHSIKKNLIGALLFDSGETAEATRLKRTARRRYTRRKNRICYLQEIFSNEMAKVDDSFFHRLEESFLVEEDKKHERHPIFGNIVDEVAYHEKYPTIYHLRKKLVDSTDKADLRLIYLALAHMIKFRGHFLIEGDLNPDNSDVDKLFIQLVQTYNQLFEENPINASGVDAKAILSARLSKSRRLENLIAQLPGEKKNGLFGNLIALSLGLTPNFKSNFDLAEDAKLQLSKDTYDDDLDNLLAQIGDQYADLFLAAKNLSDAILLSDILRVNTEITKAPLSASMIKRYDEHHQDLTLLKALVRQQLPEKYKEIFFDQSKNGYAGYIDGGASQEEFYKFIKPILEKMDGTEELLVKLNREDLLRKQRTFDNGSIPHQIHLGELHAILRRQEDFYPFLKDNREKIEKILTFRIPYYVGPLARGNSRFAWMTRKSEETITPWNFEEVVDKGASAQSFIERMTNFDKNLPNEKVLPKHSLLYEYFTVYNELTKVKYVTEGMRKPAFLSGEQKKAIVDLLFKTNRKVTVKQLKEDYFKKIECFDSVEISGVEDRFNASLGTYHDLLKIIKDKDFLDNEENEDILEDIVLTLTLFEDREMIEERLKTYAHLFDDKVMKQLKRRRYTGWGRLSRKLINGIRDKQSGKTILDFLKSDGFANRNFMQLIHDDSLTFKEDIQKAQVSGQGDSLHEHIANLAGSPAIKKGILQTVKVVDELVKVMGRHKPENIVIEMARENQTTQKGQKNSRERMKRIEEGIKELGSQILKEHPVENTQLQNEKLYLYYLQNGRDMYVDQELDINRLSDYDVDHIVPQSFLKDDSIDNKVLTRSDKNRGKSDNVPSEEVVKKMKNYWRQLLNAKLITQRKFDNLTKAERGGLSELDKAGFIKRQLVETRQITKHVAQILDSRMNTKYDENDKLIREVKVITLKSKLVSDFRKDFQFYKVREINNYHHAHDAYLNAVVGTALIKKYPKLESEFVYGDYKVYDVRKMIAKSEQEIGKATAKYFFYSNIMNFFKTEITLANGEIRKRPLIETNGETGEIVWDKGRDFATVRKVLSMPQVNIVKKTEVQTGGFSKESILPKRNSDKLIARKKDWDPKKYGGFDSPTVAYSVLVVAKVEKGKSKKLKSVKELLGITIMERSSFEKNPIDFLEAKGYKEVKKDLIIKLPKYSLFELENGRKRMLASAGELQKGNELALPSKYVNFLYLASHYEKLKGSPEDNEQKQLFVEQHKHYLDEIIEQISEFSKRVILADANLDKVLSAYNKHRDKPIREQAENIIHLFTLTNLGAPAAFKYFDTTIDRKRYTSTKEVLDATLIHQSITGLYETRIDLSQLGGDGGGSPKKKRKV

SEQ ID NO: 1341 - protein, 1379 aa, synthetic construct
  REGION 1..1379: note = Synthetic
MDKKYSIGLAIGTNSVGWAVITDEYKVPSKKFKVLGNTDRHSIKKNLIGALLFDSGETAEATRLKRTARRRYTRRKNRICYLQEIFSNEMAKVDDSFFHRLEESFLVEEDKKHERHPIFGNIVDEVAYHEKYPTIYHLRKKLVDSTDKADLRLIYLALAHMIKFRGHFLIEGDLNPDNSDVDKLFIQLVQTYNQLFEENPINASGVDAKAILSARLSKSRRLENLIAQLPGEKKNGLFGNLIALSLGLTPNFKSNFDLAEDAKLQLSKDTYDDDLDNLLAQIGDQYADLFLAAKNLSDAILLSDILRVNTEITKAPLSASMIKRYDEHHQDLTLLKALVRQQLPEKYKEIFFDQSKNGYAGYIDGGASQEEFYKFIKPILEKMDGTEELLVKLNREDLLRKQRTFDNGSIPHQIHLGELHAILRRQEDFYPFLKDNREKIEKILTFRIPYYVGPLARGNSRFAWMTRKSEETITPWNFEEVVDKGASAQSFIERMTNFDKNLPNEKVLPKHSLLYEYFTVYNELTKVKYVTEGMRKPAFLSGEQKKAIVDLLFKTNRKVTVKQLKEDYFKKIECFDSVEISGVEDRFNASLGTYHDLLKIIKDKDFLDNEENEDILEDIVLTLTLFEDREMIEERLKTYAHLFDDKVMKQLKRRRYTGWGRLSRKLINGIRDKQSGKTILDFLKSDGFANRNFMQLIHDDSLTFKEDIQKAQVSGQGDSLHEHIANLAGSPAIKKGILQTVKVVDELVKVMGRHKPENIVIEMARENQTTQKGQKNSRERMKRIEEGIKELGSQILKEHPVENTQLQNEKLYLYYLQNGRDMYVDQELDINRLSDYDVDHIVPQSFLKDDSIDNKVLTRSDKNRGKSDNVPSEEVVKKMKNYWRQLLNAKLITQRKFDNLTKAERGGLSELDKAGFIKRQLVETRQITKHVAQILDSRMNTKYDENDKLIREVKVITLKSKLVSDFRKDFQFYKVREINNYHHAHDAYLNAVVGTALIKKYPKLESEFVYGDYKVYDVRKMIAKSEQEIGKATAKYFFYSNIMNFFKTEITLANGEIRKRPLIETNGETGEIVWDKGRDFATVRKVLSMPQVNIVKKTEVQTGGFSKESILPKRNSDKLIARKKDWDPKKYGGFDSPTVAYSVLVVAKVEKGKSKKLKSVKELLGITIMERSSFEKNPIDFLEAKGYKEVKKDLIIKLPKYSLFELENGRKRMLASAGELQKGNELALPSKYVNFLYLASHYEKLKGSPEDNEQKQLFVEQHKHYLDEIIEQISEFSKRVILADANLDKVLSAYNKHRDKPIREQAENIIHLFTLTNLGAPAAFKYFDTTIDRKRYTSTKEVLDATLIHQSITGLYETRIDLSQLGGDGGGSPKKKRKV

SEQ ID NO: 1342 - protein, 1379 aa, synthetic construct
  REGION 1..1379: note = Synthetic
MDKKYSIGLAIGTNSVGWAVITDEYKVPSKKFKVLGNTDRHSIKKNLIGALLFDSGETAEATRLKRTARRRYTRRKNRICYLQEIFSNEMAKVDDSFFHRLEESFLVEEDKKHERHPIFGNIVDEVAYHEKYPTIYHLRKKLVDSTDKADLRLIYLALAHMIKFRGHFLIEGDLNPDNSDVDKLFIQLVQTYNQLFEENPINASGVDAKAILSARLSKSRRLENLIAQLPGEKKNGLFGNLIALSLGLTPNFKSNFDLAEDAKLQLSKDTYDDDLDNLLAQIGDQYADLFLAAKNLSDAILLSDILRVNTEITKAPLSASMIKRYDEHHQDLTLLKALVRQQLPEKYKEIFFDQSKNGYAGYIDGGASQEEFYKFIKPILEKMDGTEELLVKLNREDLLRKQRTFDNGSIPHQIHLGELHAILRRQEDFYPFLKDNREKIEKILTFRIPYYVGPLARGNSRFAWMTRKSEETITPWNFEEVVDKGASAQSFIERMTNFDKNLPNEKVLPKHSLLYEYFTVYNELTKVKYVTEGMRKPAFLSGEQKKAIVDLLFKTNRKVTVKQLKEDYFKKIECFDSVEISGVEDRFNASLGTYHDLLKIIKDKDFLDNEENEDILEDIVLTLTLFEDREMIEERLKTYAHLFDDKVMKQLKRRRYTGWGRLSRKLINGIRDKQSGKTILDFLKSDGFANRNFMQLIHDDSLTFKEDIQKAQVSGQGDSLHEHIANLAGSPAIKKGILQTVKVVDELVKVMGRHKPENIVIEMARENQTTQKGQKNSRERMKRIEEGIKELGSQILKEHPVENTQLQNEKLYLYYLQNGRDMYVDQELDINRLSDYDVDAIVPQSFLKDDSIDNKVLTRSDKNRGKSDNVPSEEVVKKMKNYWRQLLNAKLITQRKFDNLTKAERGGLSELDKAGFIKRQLVETRQITKHVAQILDSRMNTKYDENDKLIREVKVITLKSKLVSDFRKDFQFYKVREINNYHHAHDAYLNAVVGTALIKKYPKLESEFVYGDYKVYDVRKMIAKSEQEIGKATAKYFFYSNIMNFFKTEITLANGEIRKRPLIETNGETGEIVWDKGRDFATVRKVLSMPQVNIVKKTEVQTGGFSKESILPKRNSDKLIARKKDWDPKKYGGFDSPTVAYSVLVVAKVEKGKSKKLKSVKELLGITIMERSSFEKNPIDFLEAKGYKEVKKDLIIKLPKYSLFELENGRKRMLASAGELQKGNELALPSKYVNFLYLASHYEKLKGSPEDNEQKQLFVEQHKHYLDEIIEQISEFSKRVILADANLDKVLSAYNKHRDKPIREQAENIIHLFTLTNLGAPAAFKYFDTTIDRKRYTSTKEVLDATLIHQSITGLYETRIDLSQLGGDGGGSPKKKRKV

SEQ ID NO: 1343 - protein, 1368 aa, synthetic construct
  REGION 1..1368: note = Synthetic
MDKKYSIGLAIGTNSVGWAVITDEYKVPSKKFKVLGNTDRHSIKKNLIGALLFDSGETAEATRLKRTARRRYTRRKNRICYLQEIFSNEMAKVDDSFFHRLEESFLVEEDKKHERHPIFGNIVDEVAYHEKYPTIYHLRKKLVDSTDKADLRLIYLALAHMIKFRGHFLIEGDLNPDNSDVDKLFIQLVQTYNQLFEENPINASGVDAKAILSARLSKSRRLENLIAQLPGEKKNGLFGNLIALSLGLTPNFKSNFDLAEDAKLQLSKDTYDDDLDNLLAQIGDQYADLFLAAKNLSDAILLSDILRVNTEITKAPLSASMIKRYDEHHQDLTLLKALVRQQLPEKYKEIFFDQSKNGYAGYIDGGASQEEFYKFIKPILEKMDGTEELLVKLNREDLLRKQRTFDNGSIPHQIHLGELHAILRRQEDFYPFLKDNREKIEKILTFRIPYYVGPLARGNSRFAWMTRKSEETITPWNFEEVVDKGASAQSFIERMTNFDKNLPNEKVLPKHSLLYEYFTVYNELTKVKYVTEGMRKPAFLSGEQKKAIVDLLFKTNRKVTVKQLKEDYFKKIECFDSVEISGVEDRFNASLGTYHDLLKIIKDKDFLDNEENEDILEDIVLTLTLFEDREMIEERLKTYAHLFDDKVMKQLKRRRYTGWGRLSRKLINGIRDKQSGKTILDFLKSDGFANRNFMQLIHDDSLTFKEDIQKAQVSGQGDSLHEHIANLAGSPAIKKGILQTVKVVDELVKVMGRHKPENIVIEMARENQTTQKGQKNSRERMKRIEEGIKELGSQILKEHPVENTQLQNEKLYLYYLQNGRDMYVDQELDINRLSDYDVDHIVPQSFLKDDSIDNKVLTRSDKNRGKSDNVPSEEVVKKMKNYWRQLLNAKLITQRKFDNLTKAERGGLSELDKAGFIKRQLVETRQITKHVAQILDSRMNTKYDENDKLIREVKVITLKSKLVSDFRKDFQFYKVREINNYHHAHDAYLNAVVGTALIKKYPKLESEFVYGDYKVYDVRKMIAKSEQEIGKATAKYFFYSNIMNFFKTEITLANGEIRKRPLIETNGETGEIVWDKGRDFATVRKVLSMPQVNIVKKTEVQTGGFSKESILPKRNSDKLIARKKDWDPKKYGGFDSPTVAYSVLVVAKVEKGKSKKLKSVKELLGITIMERSSFEKNPIDFLEAKGYKEVKKDLIIKLPKYSLFELENGRKRMLASAGELQKGNELALPSKYVNFLYLASHYEKLKGSPEDNEQKQLFVEQHKHYLDEIIEQISEFSKRVILADANLDKVLSAYNKHRDKPIREQAENIIHLFTLTNLGAPAAFKYFDTTIDRKRYTSTKEVLDATLIHQSITGLYETRIDLSQLGGD

SEQ ID NO: 1344 - protein, 1368 aa, synthetic construct
  REGION 1..1368: note = Synthetic
MDKKYSIGLAIGTNSVGWAVITDEYKVPSKKFKVLGNTDRHSIKKNLIGALLFDSGETAEATRLKRTARRRYTRRKNRICYLQEIFSNEMAKVDDSFFHRLEESFLVEEDKKHERHPIFGNIVDEVAYHEKYPTIYHLRKKLVDSTDKADLRLIYLALAHMIKFRGHFLIEGDLNPDNSDVDKLFIQLVQTYNQLFEENPINASGVDAKAILSARLSKSRRLENLIAQLPGEKKNGLFGNLIALSLGLTPNFKSNFDLAEDAKLQLSKDTYDDDLDNLLAQIGDQYADLFLAAKNLSDAILLSDILRVNTEITKAPLSASMIKRYDEHHQDLTLLKALVRQQLPEKYKEIFFDQSKNGYAGYIDGGASQEEFYKFIKPILEKMDGTEELLVKLNREDLLRKQRTFDNGSIPHQIHLGELHAILRRQEDFYPFLKDNREKIEKILTFRIPYYVGPLARGNSRFAWMTRKSEETITPWNFEEVVDKGASAQSFIERMTNFDKNLPNEKVLPKHSLLYEYFTVYNELTKVKYVTEGMRKPAFLSGEQKKAIVDLLFKTNRKVTVKQLKEDYFKKIECFDSVEISGVEDRFNASLGTYHDLLKIIKDKDFLDNEENEDILEDIVLTLTLFEDREMIEERLKTYAHLFDDKVMKQLKRRRYTGWGRLSRKLINGIRDKQSGKTILDFLKSDGFANRNFMQLIHDDSLTFKEDIQKAQVSGQGDSLHEHIANLAGSPAIKKGILQTVKVVDELVKVMGRHKPENIVIEMARENQTTQKGQKNSRERMKRIEEGIKELGSQILKEHPVENTQLQNEKLYLYYLQNGRDMYVDQELDINRLSDYDVDAIVPQSFLKDDSIDNKVLTRSDKNRGKSDNVPSEEVVKKMKNYWRQLLNAKLITQRKFDNLTKAERGGLSELDKAGFIKRQLVETRQITKHVAQILDSRMNTKYDENDKLIREVKVITLKSKLVSDFRKDFQFYKVREINNYHHAHDAYLNAVVGTALIKKYPKLESEFVYGDYKVYDVRKMIAKSEQEIGKATAKYFFYSNIMNFFKTEITLANGEIRKRPLIETNGETGEIVWDKGRDFATVRKVLSMPQVNIVKKTEVQTGGFSKESILPKRNSDKLIARKKDWDPKKYGGFDSPTVAYSVLVVAKVEKGKSKKLKSVKELLGITIMERSSFEKNPIDFLEAKGYKEVKKDLIIKLPKYSLFELENGRKRMLASAGELQKGNELALPSKYVNFLYLASHYEKLKGSPEDNEQKQLFVEQHKHYLDEIIEQISEFSKRVILADANLDKVLSAYNKHRDKPIREQAENIIHLFTLTNLGAPAAFKYFDTTIDRKRYTSTKEVLDATLIHQSITGLYETRIDLSQLGGD

SEQ ID NO: 1345 - protein, 1392 aa, synthetic construct
  REGION 1..1392: note = Synthetic
MDKKYSIGLDIGTNSVGWAVITDEYKVPSKKFKVLGNTDRHSIKKNLIGALLFDSGETAEATRLKRTARRRYTRRKNRICYLQEIFSNEMAKVDDSFFHRLEESFLVEEDKKHERHPIFGNIVDEVAYHEKYPTIYHLRKKLVDSTDKADLRLIYLALAHMIKFRGHFLIEGDLNPDNSDVDKLFIQLVQTYNQLFEENPINASGVDAKAILSARLSKSRRLENLIAQLPGEKKNGLFGNLIALSLGLTPNFKSNFDLAEDAKLQLSKDTYDDDLDNLLAQIGDQYADLFLAAKNLSDAILLSDILRVNTEITKAPLSASMIKRYDEHHQDLTLLKALVRQQLPEKYKEIFFDQSKNGYAGYIDGGASQEEFYKFIKPILEKMDGTEELLVKLNREDLLRKQRTFDNGSIPHQIHLGELHAILRRQEDFYPFLKDNREKIEKILTFRIPYYVGPLARGNSRFAWMTRKSEETITPWNFEEVVDKGASAQSFIERMTNFDKNLPNEKVLPKHSLLYEYFTVYNELTKVKYVTEGMRKPAFLSGEQKKAIVDLLFKTNRKVTVKQLKEDYFKKIECFDSVEISGVEDRFNASLGTYHDLLKIIKDKDFLDNEENEDILEDIVLTLTLFEDREMIEERLKTYAHLFDDKVMKQLKRRRYTGWGRLSRKLINGIRDKQSGKTILDFLKSDGFANRNFMQLIHDDSLTFKEDIQKAQVSGQGDSLHEHIANLAGSPAIKKGILQTVKVVDELVKVMGRHKPENIVIEMARENQTTQKGQKNSRERMKRIEEGIKELGSQILKEHPVENTQLQNEKLYLYYLQNGRDMYVDQELDINRLSDYDVDHIVPQSFLKDDSIDNKVLTRSDKNRGKSDNVPSEEVVKKMKNYWRQLLNAKLITQRKFDNLTKAERGGLSELDKAGFIKRQLVETRQITKHVAQILDSRMNTKYDENDKLIREVKVITLKSKLVSDFRKDFQFYKVREINNYHHAHDAYLNAVVGTALIKKYPKLESEFVYGDYKVYDVRKMIAKSEQEIGKATAKYFFYSNIMNFFKTEITLANGEIRKRPLIETNGETGEIVWDKGRDFATVRKVLSMPQVNIVKKTEVQTGGFSKESILPKRNSDKLIARKKDWDPKKYGGFDSPTVAYSVLVVAKVEKGKSKKLKSVKELLGITIMERSSFEKNPIDFLEAKGYKEVKKDLIIKLPKYSLFELENGRKRMLASAGELQKGNELALPSKYVNFLYLASHYEKLKGSPEDNEQKQLFVEQHKHYLDEIIEQISEFSKRVILADANLDKVLSAYNKHRDKPIREQAENIIHLFTLTNLGAPAAFKYFDTTIDRKRYTSTKEVLDATLIHQSITGLYETRIDLSQLGGDGSGSPKKKRKVDGSPKKKRKVDSG

SEQ ID NO: 1346 - protein, 1392 aa, synthetic construct
  REGION 1..1392: note = Synthetic
MDKKYSIGLAIGTNSVGWAVITDEYKVPSKKFKVLGNTDRHSIKKNLIGALLFDSGETAEATRLKRTARRRYTRRKNRICYLQEIFSNEMAKVDDSFFHRLEESFLVEEDKKHERHPIFGNIVDEVAYHEKYPTIYHLRKKLVDSTDKADLRLIYLALAHMIKFRGHFLIEGDLNPDNSDVDKLFIQLVQTYNQLFEENPINASGVDAKAILSARLSKSRRLENLIAQLPGEKKNGLFGNLIALSLGLTPNFKSNFDLAEDAKLQLSKDTYDDDLDNLLAQIGDQYADLFLAAKNLSDAILLSDILRVNTEITKAPLSASMIKRYDEHHQDLTLLKALVRQQLPEKYKEIFFDQSKNGYAGYIDGGASQEEFYKFIKPILEKMDGTEELLVKLNREDLLRKQRTFDNGSIPHQIHLGELHAILRRQEDFYPFLKDNREKIEKILTFRIPYYVGPLARGNSRFAWMTRKSEETITPWNFEEVVDKGASAQSFIERMTNFDKNLPNEKVLPKHSLLYEYFTVYNELTKVKYVTEGMRKPAFLSGEQKKAIVDLLFKTNRKVTVKQLKEDYFKKIECFDSVEISGVEDRFNASLGTYHDLLKIIKDKDFLDNEENEDILEDIVLTLTLFEDREMIEERLKTYAHLFDDKVMKQLKRRRYTGWGRLSRKLINGIRDKQSGKTILDFLKSDGFANRNFMQLIHDDSLTFKEDIQKAQVSGQGDSLHEHIANLAGSPAIKKGILQTVKVVDELVKVMGRHKPENIVIEMARENQTTQKGQKNSRERMKRIEEGIKELGSQILKEHPVENTQLQNEKLYLYYLQNGRDMYVDQELDINRLSDYDVDHIVPQSFLKDDSIDNKVLTRSDKNRGKSDNVPSEEVVKKMKNYWRQLLNAKLITQRKFDNLTKAERGGLSELDKAGFIKRQLVETRQITKHVAQILDSRMNTKYDENDKLIREVKVITLKSKLVSDFRKDFQFYKVREINNYHHAHDAYLNAVVGTALIKKYPKLESEFVYGDYKVYDVRKMIAKSEQEIGKATAKYFFYSNIMNFFKTEITLANGEIRKRPLIETNGETGEIVWDKGRDFATVRKVLSMPQVNIVKKTEVQTGGFSKESILPKRNSDKLIARKKDWDPKKYGGFDSPTVAYSVLVVAKVEKGKSKKLKSVKELLGITIMERSSFEKNPIDFLEAKGYKEVKKDLIIKLPKYSLFELENGRKRMLASAGELQKGNELALPSKYVNFLYLASHYEKLKGSPEDNEQKQLFVEQHKHYLDEIIEQISEFSKRVILADANLDKVLSAYNKHRDKPIREQAENIIHLFTLTNLGAPAAFKYFDTTIDRKRYTSTKEVLDATLIHQSITGLYETRIDLSQLGGDGSGSPKKKRKVDGSPKKKRKVDSG

SEQ ID NO: 1347 - protein, 1392 aa, synthetic construct
  REGION 1..1392: note = Synthetic
MDKKYSIGLAIGTNSVGWAVITDEYKVPSKKFKVLGNTDRHSIKKNLIGALLFDSGETAEATRLKRTARRRYTRRKNRICYLQEIFSNEMAKVDDSFFHRLEESFLVEEDKKHERHPIFGNIVDEVAYHEKYPTIYHLRKKLVDSTDKADLRLIYLALAHMIKFRGHFLIEGDLNPDNSDVDKLFIQLVQTYNQLFEENPINASGVDAKAILSARLSKSRRLENLIAQLPGEKKNGLFGNLIALSLGLTPNFKSNFDLAEDAKLQLSKDTYDDDLDNLLAQIGDQYADLFLAAKNLSDAILLSDILRVNTEITKAPLSASMIKRYDEHHQDLTLLKALVRQQLPEKYKEIFFDQSKNGYAGYIDGGASQEEFYKFIKPILEKMDGTEELLVKLNREDLLRKQRTFDNGSIPHQIHLGELHAILRRQEDFYPFLKDNREKIEKILTFRIPYYVGPLARGNSRFAWMTRKSEETITPWNFEEVVDKGASAQSFIERMTNFDKNLPNEKVLPKHSLLYEYFTVYNELTKVKYVTEGMRKPAFLSGEQKKAIVDLLFKTNRKVTVKQLKEDYFKKIECFDSVEISGVEDRFNASLGTYHDLLKIIKDKDFLDNEENEDILEDIVLTLTLFEDREMIEERLKTYAHLFDDKVMKQLKRRRYTGWGRLSRKLINGIRDKQSGKTILDFLKSDGFANRNFMQLIHDDSLTFKEDIQKAQVSGQGDSLHEHIANLAGSPAIKKGILQTVKVVDELVKVMGRHKPENIVIEMARENQTTQKGQKNSRERMKRIEEGIKELGSQILKEHPVENTQLQNEKLYLYYLQNGRDMYVDQELDINRLSDYDVDAIVPQSFLKDDSIDNKVLTRSDKNRGKSDNVPSEEVVKKMKNYWRQLLNAKLITQRKFDNLTKAERGGLSELDKAGFIKRQLVETRQITKHVAQILDSRMNTKYDENDKLIREVKVITLKSKLVSDFRKDFQFYKVREINNYHHAHDAYLNAVVGTALIKKYPKLESEFVYGDYKVYDVRKMIAKSEQEIGKATAKYFFYSNIMNFFKTEITLANGEIRKRPLIETNGETGEIVWDKGRDFATVRKVLSMPQVNIVKKTEVQTGGFSKESILPKRNSDKLIARKKDWDPKKYGGFDSPTVAYSVLVVAKVEKGKSKKLKSVKELLGITIMERSSFEKNPIDFLEAKGYKEVKKDLIIKLPKYSLFELENGRKRMLASAGELQKGNELALPSKYVNFLYLASHYEKLKGSPEDNEQKQLFVEQHKHYLDEIIEQISEFSKRVILADANLDKVLSAYNKHRDKPIREQAENIIHLFTLTNLGAPAAFKYFDTTIDRKRYTSTKEVLDATLIHQSITGLYETRIDLSQLGGDGSGSPKKKRKVDGSPKKKRKVDSG

SEQ ID NO: 1348 - protein, 1331 aa, synthetic construct
  REGION 1..1331: note = Synthetic
MTQFEGFTNLYQVSKTLRFELIPQGKTLKHIQEQGFIEEDKARNDHYKELKPIIDRIYKTYADQCLQLVQLDWENLSAAIDSYRKEKTEETRNALIEEQATYRNAIHDYFIGRTDNLTDAINKRHAEIYKGLFKAELFNGKVLKQLGTVTTTEHENALLRSFDKFTTYFSGFYENRKNVFSAEDISTAIPHRIVQDNFPKFKENCHIFTRLITAVPSLREHFENVKKAIGIFVSTSIEEVFSFPFYNQLLTQTQIDLYNQLLGGISREAGTEKIKGLNEVLNLAIQKNDETAHIIASLPHRFIPLFKQILSDRNTLSFILEEFKSDEEVIQSFCKYKTLLRNENVLETAEALFNELNSIDLTHIFISHKKLETISSALCDHWDTLRNALYERRISELTGKITKSAKEKVQRSLKHEDINLQEIISAAGKELSEAFKQKTSEILSHAHAALDQPLPTTLKKQEEKEILKSQLDSLLGLYHLLDWFAVDESNEVDPEFSARLTGIKLEMEPSLSFYNKARNYATKKPYSVEKFKLNFQRPTLASGWDVNKEKNNGAILFVKNGLYYLGIMPKQKGRYKALSFEPTEKTSEGFDKMYYDYFPDAAKMIPKCSTQLKAVTAHFQTHTTPILLSNNFIEPLEITKEIYDLNNPEKEPKKFQTAYAKKTGDQKGYREALCKWIDFTRDFLSKYTKTTSIDLSSLRPSSQYKDLGEYYAELNPLLYHISFQRIAEKEIMDAVETGKLYLFQIYNKDFAKGHHGKPNLHTLYWTGLFSPENLAKTSIKLNGQAELFYRPKSRMKRMAARLGEKMLNKKLKDQKTPIPDTLYQELYDYVNHRLSHDLSDEARALLPNVITKEVSHEIIKDRRFTSDKFLFHVPITLNYQAANSPSKFNQRVNAYLKEHPETPIIGIDRGERNLIYITVIDSTGKILEQRSLNTIQQFDYQKKLDNREKERVAARQAWSVVGTIKDLKQGYLSQVIHEIVDLMIHYQAVVVLENLNFGFKSKRTGIAEKAVYQQFEKMLIDKLNCLVLKDYPAEKVGGVLNPYQLTDQFTSFAKMGTQSGFLFYVPAPYTSKIDPLTGFVDPFVWKTIKNHESRKHFLEGFDFLHYDVKTGDFILHFKMNRNLSFQRGLPGFMPAWDIVFEKNETQFDAKGTPFIAGKRIVPVIENHRFTGRYRDLYPANELIALLEEKGIVFRDGSNILPKLLENDDSHAIDTMVALIRSVLQMRNSNAATGEDYINSPVRDLNGVCFDSRFQNPEWPMDADANGAYHIALKGQLLLNHLKESKDLKLQNGISNQDWLAYIQELRNGGSPAAKRVKLDGGSPAAKRVKLD

SEQ ID NO: 1349 - RNA, 4245 nt, Streptococcus pyogenes
  source 1..4245: mol_type = genomic RNA
atggcccccaagaagaagcggaaggtgggcatccacggcgtgcccgccgccgacaagaagtacagcatcggcctggacatcggcaccaacagcgtgggctgggccgtgatcaccgacgagtacaaggtgcccagcaagaagttcaaggtgctgggcaacaccgaccggcacagcatcaagaagaacctgatcggcgccctgctgttcgacagcggcgagaccgccgaggccacccggctgaagcggaccgcccggcggcggtacacccggcggaagaaccggatctgctacctgcaggagatcttcagcaacgagatggccaaggtggacgacagcttcttccaccggctggaggagagcttcctggtggaggaggacaagaagcacgagcggcaccccatcttcggcaacatcgtggacgaggtggcctaccacgagaagtaccccaccatctaccacctgcggaagaagctggtggacagcaccgacaaggccgacctgcggctgatctacctggccctggcccacatgatcaagttccggggccacttcctgatcgagggcgacctgaaccccgacaacagcgacgtggacaagctgttcatccagctggtgcagacctacaaccagctgttcgaggagaaccccatcaacgccagcggcgtggacgccaaggccatcctgagcgcccggctgagcaagagccggcggctggagaacctgatcgcccagctgcccggcgagaagaagaacggcctgttcggcaacctgatcgccctgagcctgggcctgacccccaacttcaagagcaacttcgacctggccgaggacgccaagctgcagctgagcaaggacacctacgacgacgacctggacaacctgctggcccagatcggcgaccagtacgccgacctgttcctggccgccaagaacctgagcgacgccatcctgctgagcgacatcctgcgggtgaacaccgagatcaccaaggcccccctgagcgccagcatgatcaagcggtacgacgagcaccaccaggacctgaccctgctgaaggccctggtgcggcagcagctgcccgagaagtacaaggagatcttcttcgaccagagcaagaacggctacgccggctacatcgacggcggcgccagccaggaggagttctacaagttcatcaagcccatcctggagaagatggacggcaccgaggagctgctggtgaagctgaaccgggaggacctgctgcggaagcagcggaccttcgacaacggcagcatcccccaccagatccacctgggcgagctgcacgccatcctgcggcggcaggaggacttctaccccttcctgaaggacaaccgggagaagatcgagaagatcctgaccttccggatcccctactacgtgggccccctggcccggggcaacagccggttcgcctggatgacccggaagagcgaggagaccatcaccccctggaacttcgaggaggtggtggacaagggcgccagcgcccagagcttcatcgagcggatgaccaacttcgacaagaacctgcccaacgagaaggtgctgcccaagcacagcctgctgtacgagtacttcaccgtgtacaacgagctgaccaaggtgaagtacgtgaccgagggcatgcggaagcccgccttcctgagcggcgagcagaagaaggccatcgtggacctgctgttcaagaccaaccggaaggtgaccgtgaagcagctgaaggaggactacttcaagaagatcgagtgcttcgacagcgtggagatcagcggcgtggaggaccggttcaacgccagcctgggcacctaccacgacctgctgaagatcatcaaggacaaggacttcctggacaacgaggagaacgaggacatcctggaggacatcgtgctgaccctgaccctgttcgaggaccgggagatgatcgaggagcggctgaagacctacgcccacctgttcgacgacaaggtgatgaagcagctgaagcggcggcggtacaccggctggggccggctgagccggaagctgatcaacggcatccgggacaagcagagcggcaagaccatcctggacttcctgaagagcgacggcttcgccaaccggaacttcatgcagctgatccacgacgacagcctgaccttcaaggaggacatccagaaggcccaggtgagcggccagggcgacagcctgcacgagcacatcgccaacctggccggcagccccgccatcaagaagggcatcctgcagaccgtgaaggtggtggacgagctggtgaaggtgatgggccggcacaagcccgagaacatcgtgatcgagatggcccgggagaaccagaccacccagaagggccagaagaacagccgggagcggatgaagcggatcgaggagggcatcaaggagctgggcagccagatcctgaaggagcaccccgtggagaacacccagctgcagaacgagaagctgtacctgtactacctgcagaacggccgggacatgtacgtggaccaggagctggacatcaaccggctgagcgactacgacgtggaccacatcgtgccccagagcttcctgaaggacgacagcatcgacaacaaggtgctgacccggagcgacaagaaccggggcaagagcgacaacgtgcccagcgaggaggtggtgaagaagatgaagaactactggcggcagctgctgaacgccaagctgatcacccagcggaagttcgacaacctgaccaaggccgagcggggcggcctgagcgagctggacaaggccggcttcatcaagcggcagctggtggagacccggcagatcaccaagcacgtggcccagatcctggacagccggatgaacaccaagtacgacgagaacgacaagctgatccgggaggtgaaggtgatcaccctgaagagcaagctggtgagcgacttccggaaggacttccagttctacaaggtgcgggagatcaacaactaccaccacgcccacgacgcctacctgaacgccgtggtgggcaccgccctgatcaagaagtaccccaagctggagagcgagttcgtgtacggcgactacaaggtgtacgacgtgcggaagatgatcgccaagagcgagcaggagatcggcaaggccaccgccaagtacttcttctacagcaacatcatgaacttcttcaagaccgagatcaccctggccaacggcgagatccggaagcggcccctgatcgagaccaacggcgagaccggcgagatcgtgtgggacaagggccgggacttcgccaccgtgcggaaggtgctgagcatgccccaggtgaacatcgtgaagaagaccgaggtgcagaccggcggcttcagcaaggagagcatcctgcccaagcggaacagcgacaagctgatcgcccggaagaaggactgggaccccaagaagtacggcggcttcgacagccccaccgtggcctacagcgtgctggtggtggccaaggtggagaagggcaagagcaagaagctgaagagcgtgaaggagctgctgggcatcaccatcatggagcggagcagcttcgagaagaaccccatcgacttcctggaggccaagggctacaaggaggtgaagaaggacctgatcatcaagctgcccaagtacagcctgttcgagctggagaacggccggaagcggatgctggccagcgccggcgagctgcagaagggcaacgagctggccctgcccagcaagtacgtgaacttcctgtacctggccagccactacgagaagctgaagggcagccccgaggacaacgagcagaagcagctgttcgtggagcagcacaagcactacctggacgagatcatcgagcagatcagcgagttcagcaagcgggtgatcctggccgacgccaacctggacaaggtgctgagcgcctacaacaagcaccgggacaagcccatccgggagcaggccgagaacatcatccacctgttcaccctgaccaacctgggcgcccccgccgccttcaagtacttcgacaccaccatcgaccggaagcggtacaccagcaccaaggaggtgctggacgccaccctgatccaccagagcatcaccggcctgtacgagacccggatcgacctgagccagctgggcggcgacagcggcggcaagcggcccgccgccaccaagaaggccggccaggccaagaagaagaagggcagctacccctacgacgtgcccgactacgcctga

SEQ ID NO: 1350 - DNA, 4409 bp, synthetic construct
  misc_feature 1..4409: note = Synthetic
  source 1..4409: mol_type = other DNA
gggtcccgcagtcggcgtccagcggctctgcttgttcgtgtgtgtgtcgttgcaggccttattcggatccgccaccatgcctaagaaaaagcggaaggtcgacggggataagaagtactcaatcgggctggatatcggaactaattccgtgggttgggcagtgatcacggatgaatacaaagtgccgtccaagaagttcaaggtcctggggaacaccgatagacacagcatcaagaaaaatctcatcggagccctgctgtttgactccggcgaaaccgcagaagcgacccggctcaaacgtaccgcgaggcgacgctacacccggcggaagaatcgcatctgctatctgcaagagatcttttcgaacgaaatggcaaaggtcgacgacagcttcttccaccgcctggaagaatctttcctggtggaggaggacaagaagcatgaacggcatcctatctttggaaacatcgtcgacgaagtggcgtaccacgaaaagtacccgaccatctaccatctgcggaagaagttggttgactcaactgacaaggccgacctcagattgatctacttggccctcgcccatatgatcaaattccgcggacacttcctgatcgaaggcgatctgaaccctgataactccgacgtggataagcttttcattcaactggtgcagacctacaaccaactgttcgaagaaaacccaatcaatgctagcggcgtcgatgccaaggccatcctgtccgcccggctgtcgaagtcgcggcgcctcgaaaacctgatcgcacagctgccgggagagaaaaagaacggacttttcggcaacttgatcgctctctcactgggactcactcccaatttcaagtccaattttgacctggccgaggacgcgaagctgcaactctcaaaggacacctacgacgacgacttggacaatttgctggcacaaattggcgatcagtacgcggatctgttccttgccgctaagaacctttcggacgcaatcttgctgtccgatatcctgcgcgtgaacaccgaaataaccaaagcgccgcttagcgcctcgatgattaagcggtacgacgagcatcaccaggatctcacgctgctcaaagcgctcgtgagacagcaactgcctgaaaagtacaaggagatcttcttcgaccagtccaagaatgggtacgcagggtacatcgatggaggcgctagccaggaagagttctataagttcatcaagccaatcctggaaaagatggacggaaccgaagaactgctggtcaagctgaacagggaggatctgctccggaaacagagaacctttgacaacggatccattccccaccagatccatctgggtgagctgcacgccatcttgcggcgccaggaggacttttacccattcctcaaggacaaccgggaaaagatcgagaaaattctgacgttccgcatcccgtattacgtgggcccactggcgcgcggcaattcgcgcttcgcgtggatgactagaaaatcagaggaaaccatcactccttggaatttcgaggaagttgtggataagggagcttcggcacaaagcttcatcgaacgaatgaccaacttcgacaagaatctcccaaacgagaaggtgcttcctaagcacagcctcctttacgaatacttcactgtctacaacgaactgactaaagtgaaatacgttactgaaggaatgaggaagccggcctttctgtccggagaacagaagaaagcaattgtcgatctgctgttcaagaccaaccgcaaggtgaccgtcaagcagcttaaagaggactacttcaagaagatcgagtgtttcgactcagtggaaatcagcggggtggaggacagattcaacgcttcgctgggaacctatcatgatctcctgaagatcatcaaggacaaggacttccttgacaacgaggagaacgaggacatcctggaagatatcgtcctgaccttgacccttttcgaggatcgcgagatgatcgaggagaggcttaagacctacgctcatctcttcgacgataaggtcatgaaacaactcaagcgccgccggtacactggttggggccgcctctcccgcaagctgatcaacggtattcgcgataaacagagcggtaaaactatcctggatttcctcaaatcggatggcttcgctaatcgtaacttcatgcaattgatccacgacgacagcctgacctttaaggaggacatccaaaaagcacaagtgtccggacagggagactcactccatgaacacatcgcgaatctggccggttcgccggcgattaagaagggaattctgcaaactgtgaaggtggtcgacgagctggtgaaggtcatgggacggcacaaaccggagaatatcgtgattgaaatggcccgagaaaaccagactacccagaagggccagaaaaactcccgcgaaaggatgaagcggatcgaagaaggaatcaaggagctgggcagccagatcctgaaagagcacccggtggaaaacacgcagctgcagaacgagaagctctacctgtactatttgcaaaatggacgggacatgtacgtggaccaagagctggacatcaatcggttgtctgattacgacgtggaccacatcgttccacagtcctttctgaaggatgactcgatcgataacaaggtgttgactcgcagcgacaagaacagagggaagtcagataatgtgccatcggaggaggtcgtgaagaagatgaagaattactggcggcagctcctgaatgcgaagctgattacccagagaaagtttgacaatctcactaaagccgagcgcggcggactctcagagctggataaggctggattcatcaaacggcagctggtcgagactcggcagattaccaagcacgtggcgcagatcttggactcccgcatgaacactaaatacgacgagaacgataagctcatccgggaagtgaaggtgattaccctgaaaagcaaacttgtgtcggactttcggaaggactttcagttttacaaagtgagagaaatcaacaactaccatcacgcgcatgacgcatacctcaacgctgtggtcggtaccgccctgatcaaaaagtaccctaaacttgaatcggagtttgtgtacggagactacaaggtctacgacgtgaggaagatgatagccaagtccgaacaggaaatcgggaaagcaactgcgaaatacttcttttactcaaacatcatgaactttttcaagactgaaattacgctggccaatggagaaatcaggaagaggccactgatcgaaactaacggagaaacgggcgaaatcgtgtgggacaagggcagggacttcgcaactgttcgcaaagtgctctctatgccgcaagtcaatattgtgaagaaaaccgaagtgcaaaccggcggattttcaaaggaatcgatcctcccaaagagaaatagcgacaagctcattgcacgcaagaaagactgggacccgaagaagtacggaggattcgattcgccgactgtcgcatactccgtcctcgtggtggccaaggtggagaagggaaagagcaaaaagctcaaatccgtcaaagagctgctggggattaccatcatggaacgatcctcgttcgagaagaacccgattgatttcctcgaggcgaagggttacaaggaggtgaagaaggatctgatcatcaaactccccaagtactcactgttcgaactggaaaatggtcggaagcgcatgctggcttcggccggagaactccaaaaaggaaatgagctggccttgcctagcaagtacgtcaacttcctctatcttgcttcgcactacgaaaaactcaaagggtcaccggaagataacgaacagaagcagcttttcgtggagcagcacaagcattatctggatgaaatcatcgaacaaatctccgagttttcaaagcgcgtgatcctcgccgacgccaacctcgacaaagtcctgtcggcctacaataagcatagagataagccgatcagagaacaggccgagaacattatccacttgttcaccctgactaacctgggagccccagccgccttcaagtacttcgatactactatcgatcgcaaaagatacacgtccaccaaggaagttctggacgcgaccctgatccaccaaagcatcactggactctacgaaactaggatcgatctgtcgcagctgggtggcgattgatagtctagccatcacatttaaaagcatctcagcctaccatgagaataagagaaagaaaatgaagatcaatagcttattcatctctttttctttttcgttggtgtaaagccaacaccctgtctaaaaaacataaatttctttaatcattttgcctcttttctctgtgcttcaattaataaaaaatggaaagaacctcgag

SEQ ID NO: 1351 - DNA, 4411 bp, synthetic construct
  misc_feature 1..4411: note = Synthetic
  source 1..4411: mol_type = other DNA
gggtcccgcagtcggcgtccagcggctctgcttgttcgtgtgtgtgtcgttgcaggccttattcggatccgccaccatggacaagaagtacagcatcggactggacatcggaacaaacagcgtcggatgggcagtcatcacagacgaatacaaggtcccgagcaagaagttcaaggtcctgggaaacacagacagacacagcatcaagaagaacctgatcggagcactgctgttcgacagcggagaaacagcagaagcaacaagactgaagagaacagcaagaagaagatacacaagaagaaagaacagaatctgctacctgcaggaaatcttcagcaacgaaatggcaaaggtcgacgacagcttcttccaccggctggaagaaagcttcctggtcgaagaagacaagaagcacgaaagacacccgatcttcggaaacatcgtcgacgaagtcgcataccacgaaaagtacccgacaatctaccacctgagaaagaagctggtcgacagcacagacaaggcagacctgagactgatctacctggcactggcacacatgatcaagttcagaggacacttcctgatcgaaggagacctgaacccggacaacagcgacgtcgacaagctgttcatccagctggtccagacatacaaccagctgttcgaagaaaacccgatcaacgcaagcggagtcgacgcaaaggcaatcctgagcgcaagactgagcaagagcagaagactggaaaacctgatcgcacagctgccgggagaaaagaagaacggactgttcggaaacctgatcgcactgagcctgggactgacaccgaacttcaagagcaacttcgacctggcagaagacgcaaagctgcagctgagcaaggacacatacgacgacgacctggacaacctgctggcacagatcggagaccagtacgcagacctgttcctggcagcaaagaacctgagcgacgcaatcctgctgagcgacatcctgagagtcaacacagaaatcacaaaggcaccgctgagcgcaagcatgatcaagagatacgacgaacaccaccaggacctgacactgctgaaggcactggtcagacagcagctgccggaaaagtacaaggaaatcttcttcgaccagagcaagaacggatacgcaggatacatcgacggaggagcaagccaggaagaattctacaagttcatcaagccgatcctggaaaagatggacggaacagaagaactgctggtcaagctgaacagagaagacctgctgagaaagcagagaacattcgacaacggaagcatcccgcaccagatccacctgggagaactgcacgcaatcctgagaagacaggaagacttctacccgttcctgaaggacaacagagaaaagatcgaaaagatcctgacattcagaatcccgtactacgtcggaccgctggcaagaggaaacagcagattcgcatggatgacaagaaagagcgaagaaacaatcacaccgtggaacttcgaagaagtcgtcgacaagggagcaagcgcacagagcttcatcgaaagaatgacaaacttcgacaagaacctgccgaacgaaaaggtcctgccgaagcacagcctgctgtacgaatacttcacagtctacaacgaactgacaaaggtcaagtacgtcacagaaggaatgagaaagccggcattcctgagcggagaacagaagaaggcaatcgtcgacctgctgttcaagacaaacagaaaggtcacagtcaagcagctgaaggaagactacttcaagaagatcgaatgcttcgacagcgtcgaaatcagcggagtcgaagacagattcaacgcaagcctgggaacataccacgacctgctgaagatcatcaaggacaaggacttcctggacaacgaagaaaacgaagacatcctggaagacatcgtcctgacactgacactgttcgaagacagagaaatgatcgaagaaagactgaagacatacgcacacctgttcgacgacaaggtcatgaagcagctgaagagaagaagatacacaggatggggaagactgagcagaaagctgatcaacggaatcagagacaagcagagcggaaagacaatcctggacttcctgaagagcgacggattcgcaaacagaaacttcatgcagctgatccacgacgacagcctgacattcaaggaagacatccagaaggcacaggtcagcggacagggagacagcctgcacgaacacatcgcaaacctggcaggaagcccggcaatcaagaagggaatcctgcagacagtcaaggtcgtcgacgaactggtcaaggtcatgggaagacacaagccggaaaacatcgtcatcgaaatggcaagagaaaaccagacaacacagaagggacagaagaacagcagagaaagaatgaagagaatcgaagaaggaatcaaggaactgggaagccagatcctgaaggaacacccggtcgaaaacacacagctgcagaacgaaaagctgtacctgtactacctgcaaaacggaagagacatgtacgtcgaccaggaactggacatcaacagactgagcgactacgacgtcgaccacatcgtcccgcagagcttcctgaaggacgacagcatcgacaacaaggtcctgacaagaagcgacaagaacagaggaaagagcgacaacgtcccgagcgaagaagtcgtcaagaagatgaagaactactggagacagctgctgaacgcaaagctgatcacacagagaaagttcgacaacctgacaaaggcagagagaggaggactgagcgaactggacaaggcaggattcatcaagagacagctggtcgaaacaagacagatcacaaagcacgtcgcacagatcctggacagcagaatgaacacaaagtacgacgaaaacgacaagctgatcagagaagtcaaggtcatcacactgaagagcaagctggtcagcgacttcagaaaggacttccagttctacaaggtcagagaaatcaacaactaccaccacgcacacgacgcatacctgaacgcagtcgtcggaacagcactgatcaagaagtacccgaagctggaaagcgaattcgtctacggagactacaaggtctacgacgtcagaaagatgatcgcaaagagcgaacaggaaatcggaaaggcaacagcaaagtacttcttctacagcaacatcatgaacttcttcaagacagaaatcacactggcaaacggagaaatcagaaagagaccgctgatcgaaacaaacggagaaacaggagaaatcgtctgggacaagggaagagacttcgcaacagtcagaaaggtcctgagcatgccgcaggtcaacatcgtcaagaagacagaagtccagacaggaggattcagcaaggaaagcatcctgccgaagagaaacagcgacaagctgatcgcaagaaagaaggactgggacccgaagaagtacggaggattcgacagcccgacagtcgcatacagcgtcctggtcgtcgcaaaggtcgaaaagggaaagagcaagaagctgaagagcgtcaaggaactgctgggaatcacaatcatggaaagaagcagcttcgaaaagaacccgatcgacttcctggaagcaaagggatacaaggaagtcaagaaggacctgatcatcaagctgccgaagtacagcctgttcgaactggaaaacggaagaaagagaatgctggcaagcgcaggagaactgcagaagggaaacgaactggcactgccgagcaagtacgtcaacttcctgtacctggcaagccactacgaaaagctgaagggaagcccggaagacaacgaacagaagcagctgttcgtcgaacagcacaagcactacctggacgaaatcatcgaacagatcagcgaattcagcaagagagtcatcctggcagacgcaaacctggacaaggtcctgagcgcatacaacaagcacagagacaagccgatcagagaacaggcagaaaacatcatccacctgttcacactgacaaacctgggagcaccggcagcattcaagtacttcgacacaacaatcgacagaaagagatacacaagcacaaaggaagtcctggacgcaacactgatccaccagagcatcacaggactgtacgaaacaagaatcgacctgagccagctgggaggagacggaggaggaagcccgaagaagaagagaaaggtctagctagccatcacatttaaaagcatctcagcctaccatgagaataagagaaagaaaatgaagatcaatagcttattcatctctttttctttttcgttggtgtaaagccaacaccctgtctaaaaaacataaatttctttaatcattttgcctcttttctctgtgcttcaattaataaaaaatggaaagaacctcgag

SEQ ID NO: 1352 - DNA, 4411 bp, synthetic construct
  misc_feature 1..4411: note = Synthetic
  source 1..4411: mol_type = other DNA
gggtcccgcagtcggcgtccagcggctctgcttgttcgtgtgtgtgtcgttgcaggccttattcggatccgccaccatggacaagaagtacagcatcggcctggacatcggcaccaacagcgtgggctgggccgtgatcaccgacgagtacaaggtgcccagcaagaagttcaaggtgctgggcaacaccgacagacacagcatcaagaagaacctgatcggcgccctgctgttcgacagcggcgagaccgccgaggccaccagactgaagagaaccgccagaagaagatacaccagaagaaagaacagaatctgctacctgcaggagatcttcagcaacgagatggccaaggtggacgacagcttcttccacagactggaggagagcttcctggtggaggaggacaagaagcacgagagacaccccatcttcggcaacatcgtggacgaggtggcctaccacgagaagtaccccaccatctaccacctgagaaagaagctggtggacagcaccgacaaggccgacctgagactgatctacctggccctggcccacatgatcaagttcagaggccacttcctgatcgagggcgacctgaaccccgacaacagcgacgtggacaagctgttcatccagctggtgcagacctacaaccagctgttcgaggagaaccccatcaacgccagcggcgtggacgccaaggccatcctgagcgccagactgagcaagagcagaagactggagaacctgatcgcccagctgcccggcgagaagaagaacggcctgttcggcaacctgatcgccctgagcctgggcctgacccccaacttcaagagcaacttcgacctggccgaggacgccaagctgcagctgagcaaggacacctacgacgacgacctggacaacctgctggcccagatcggcgaccagtacgccgacctgttcctggccgccaagaacctgagcgacgccatcctgctgagcgacatcctgagagtgaacaccgagatcaccaaggcccccctgagcgccagcatgatcaagagatacgacgagcaccaccaggacctgaccctgctgaaggccctggtgagacagcagctgcccgagaagtacaaggagatcttcttcgaccagagcaagaacggctacgccggctacatcgacggcggcgccagccaggaggagttctacaagttcatcaagcccatcctggagaagatggacggcaccgaggagctgctggtgaagctgaacagagaggacctgctgagaaagcagagaaccttcgacaacggcagcatcccccaccagatccacctgggcgagctgcacgccatcctgagaagacaggaggacttctaccccttcctgaaggacaacagagagaagatcgagaagatcctgaccttcagaatcccctactacgtgggccccctggccagaggcaacagcagattcgcctggatgaccagaaagagcgaggagaccatcaccccctggaacttcgaggaggtggtggacaagggcgccagcgcccagagcttcatcgagagaatgaccaacttcgacaagaacctgcccaacgagaaggtgctgcccaagcacagcctgctgtacgagtacttcaccgtgtacaacgagctgaccaaggtgaagtacgtgaccgagggcatgagaaagcccgccttcctgagcggcgagcagaagaaggccatcgtggacctgctgttcaagaccaacagaaaggtgaccgtgaagcagctgaaggaggactacttcaagaagatcgagtgcttcgacagcgtggagatcagcggcgtggaggacagattcaacgccagcctgggcacctaccacgacctgctgaagatcatcaaggacaaggacttcctggacaacgaggagaacgaggacatcctggaggacatcgtgctgaccctgaccctgttcgaggacagagagatgatcgaggagagactgaagacctacgcccacctgttcgacgacaaggtgatgaagcagctgaagagaagaagatacaccggctggggcagactgagcagaaagctgatcaacggcatcagagacaagcagagcggcaagaccatcctggacttcctgaagagcgacggcttcgccaacagaaacttcatgcagctgatccacgacgacagcctgaccttcaaggaggacatccagaaggcccaggtgagcggccagggcgacagcctgcacgagcacatcgccaacctggccggcagccccgccatcaagaagggcatcctgcagaccgtgaaggtggtggacgagctggtgaaggtgatgggcagacacaagcccgagaacatcgtgatcgagatggccagagagaaccagaccacccagaagggccagaagaacagcagagagagaatgaagagaatcgaggagggcatcaaggagctgggcagccagatcctgaaggagcaccccgtggagaacacccagctgcagaacgagaagctgtacctgtactacctgcagaacggcagagacatgtacgtggaccaggagctggacatcaacagactgagcgactacgacgtggaccacatcgtgccccagagcttcctgaaggacgacagcatcgacaacaaggtgctgaccagaagcgacaagaacagaggcaagagcgacaacgtgcccagcgaggaggtggtgaagaagatgaagaactactggagacagctgctgaacgccaagctgatcacccagagaaagttcgacaacctgaccaaggccgagagaggcggcctgagcgagctggacaaggccggcttcatcaagagacagctggtggagaccagacagatcaccaagcacgtggcccagatcctggacagcagaatgaacaccaagtacgacgagaacgacaagctgatcagagaggtgaaggtgatcaccctgaagagcaagctggtgagcgacttcagaaaggacttccagttctacaaggtgagagagatcaacaactaccaccacgcccacgacgcctacctgaacgccgtggtgggcaccgccctgatcaagaagtaccccaagctggagagcgagttcgtgtacggcgactacaaggtgtacgacgtgagaaagatgatcgccaagagcgagcaggagatcggcaaggccaccgccaagtacttcttctacagcaacatcatgaacttcttcaagaccgagatcaccctggccaacggcgagatcagaaagagacccctgatcgagaccaacggcgagaccggcgagatcgtgtgggacaagggcagagacttcgccaccgtgagaaaggtgctgagcatgccccaggtgaacatcgtgaagaagaccgaggtgcagaccggcggcttcagcaaggagagcatcctgcccaagagaaacagcgacaagctgatcgccagaaagaaggactgggaccccaagaagtacggcggcttcgacagccccaccgtggcctacagcgtgctggtggtggccaaggtggagaagggcaagagcaagaagctgaagagcgtgaaggagctgctgggcatcaccatcatggagagaagcagcttcgagaagaaccccatcgacttcctggaggccaagggctacaaggaggtgaagaaggacctgatcatcaagctgcccaagtacagcctgttcgagctggagaacggcagaaagagaatgctggccagcgccggcgagctgcagaagggcaacgagctggccctgcccagcaagtacgtgaacttcctgtacctggccagccactacgagaagctgaagggcagccccgaggacaacgagcagaagcagctgttcgtggagcagcacaagcactacctggacgagatcatcgagcagatcagcgagttcagcaagagagtgatcctggccgacgccaacctggacaaggtgctgagcgcctacaacaagcacagagacaagcccatcagagagcaggccgagaacatcatccacctgttcaccctgaccaacctgggcgcccccgccgccttcaagtacttcgacaccaccatcgacagaaagagatacaccagcaccaaggaggtgctggacgccaccctgatccaccagagcatcaccggcctgtacgagaccagaatcgacctgagccagctgggcggcgacggcggcggcagccccaagaagaagagaaaggtgtgactagccatcacatttaaaagcatctcagcctaccatgagaataagagaaagaaaatgaagatcaatagcttattcatctctttttctttttcgttggtgtaaagccaacaccctgtctaaaaaacataaatttctttaatcattttgcctcttttctctgtgcttcaattaataaaaaatggaaagaacctcgag

SEQ ID NO: 1353 - DNA, 4411 bp, synthetic construct
  misc_feature 1..4411: note = Synthetic
  source 1..4411: mol_type = other DNA
gggtcccgcagtcggcgtccagcggctctgcttgttcgtgtgtgtgtcgttgcaggccttattcggatccgccaccatggacaaaaaatacagcatagggctagacatagggacgaacagcgtagggtgggcggtaataacggacgaatacaaagtaccgagcaaaaaattcaaagtactagggaacacggaccgacacagcataaaaaaaaacctaataggggcgctactattcgacagcggggaaacggcggaagcgacgcgactaaaacgaacggcgcgacgacgatacacgcgacgaaaaaaccgaatatgctacctacaagaaatattcagcaacgaaatggcgaaagtagacgacagcttcttccaccgactagaagaaagcttcctagtagaagaagacaaaaaacacgaacgacacccgatattcgggaacatagtagacgaagtagcgtaccacgaaaaatacccgacgatataccacctacgaaaaaaactagtagacagcacggacaaagcggacctacgactaatatacctagcgctagcgcacatgataaaattccgagggcacttcctaatagaaggggacctaaacccggacaacagcgacgtagacaaactattcatacaactagtacaaacgtacaaccaactattcgaagaaaacccgataaacgcgagcggggtagacgcgaaagcgatactaagcgcgcgactaagcaaaagccgacgactagaaaacctaatagcgcaactaccgggggaaaaaaaaaacgggctattcgggaacctaatagcgctaagcctagggctaacgccgaacttcaaaagcaacttcgacctagcggaagacgcgaaactacaactaagcaaagacacgtacgacgacgacctagacaacctactagcgcaaataggggaccaatacgcggacctattcctagcggcgaaaaacctaagcgacgcgatactactaagcgacatactacgagtaaacacggaaataacgaaagcgccgctaagcgcgagcatgataaaacgatacgacgaacaccaccaagacctaacgctactaaaagcgctagtacgacaacaactaccggaaaaatacaaagaaatattcttcgaccaaagcaaaaacgggtacgcggggtacatagacgggggggcgagccaagaagaattctacaaattcataaaaccgatactagaaaaaatggacgggacggaagaactactagtaaaactaaaccgagaagacctactacgaaaacaacgaacgttcgacaacgggagcataccgcaccaaatacacctaggggaactacacgcgatactacgacgacaagaagacttctacccgttcctaaaagacaaccgagaaaaaatagaaaaaatactaacgttccgaataccgtactacgtagggccgctagcgcgagggaacagccgattcgcgtggatgacgcgaaaaagcgaagaaacgataacgccgtggaacttcgaagaagtagtagacaaaggggcgagcgcgcaaagcttcatagaacgaatgacgaacttcgacaaaaacctaccgaacgaaaaagtactaccgaaacacagcctactatacgaatacttcacggtatacaacgaactaacgaaagtaaaatacgtaacggaagggatgcgaaaaccggcgttcctaagcggggaacaaaaaaaagcgatagtagacctactattcaaaacgaaccgaaaagtaacggtaaaacaactaaaagaagactacttcaaaaaaatagaatgcttcgacagcgtagaaataagcggggtagaagaccgattcaacgcgagcctagggacgtaccacgacctactaaaaataataaaagacaaagacttcctagacaacgaagaaaacgaagacatactagaagacatagtactaacgctaacgctattcgaagaccgagaaatgatagaagaacgactaaaaacgtacgcgcacctattcgacgacaaagtaatgaaacaactaaaacgacgacgatacacggggtgggggcgactaagccgaaaactaataaacgggatacgagacaaacaaagcgggaaaacgatactagacttcctaaaaagcgacgggttcgcgaaccgaaacttcatgcaactaatacacgacgacagcctaacgttcaaagaagacatacaaaaagcgcaagtaagcgggcaaggggacagcctacacgaacacatagcgaacctagcggggagcccggcgataaaaaaagggatactacaaacggtaaaagtagtagacgaactagtaaaagtaatggggcgacacaaaccggaaaacatagtaatagaaatggcgcgagaaaaccaaacgacgcaaaaagggcaaaaaaacagccgagaacgaatgaaacgaatagaagaagggataaaagaactagggagccaaatactaaaagaacacccggtagaaaacacgcaactacaaaacgaaaaactatacctatactacctacaaaacgggcgagacatgtacgtagaccaagaactagacataaaccgactaagcgactacgacgtagaccacatagtaccgcaaagcttcctaaaagacgacagcatagacaacaaagtactaacgcgaagcgacaaaaaccgagggaaaagcgacaacgtaccgagcgaagaagtagtaaaaaaaatgaaaaactactggcgacaactactaaacgcgaaactaataacgcaacgaaaattcgacaacctaacgaaagcggaacgaggggggctaagcgaactagacaaagcggggttcataaaacgacaactagtagaaacgcgacaaataacgaaacacgtagcgcaaatactagacagccgaatgaacacgaaatacgacgaaaacgacaaactaatacgagaagtaaaagtaataacgctaaaaagcaaactagtaagcgacttccgaaaagacttccaattctacaaagtacgagaaataaacaactaccaccacgcgcacgacgcgtacctaaacgcggtagtagggacggcgctaataaaaaaatacccgaaactagaaagcgaattcgtatacggggactacaaagtatacgacgtacgaaaaatgatagcgaaaagcgaacaagaaatagggaaagcgacggcgaaatacttcttctacagcaacataatgaacttcttcaaaacggaaataacgctagcgaacggggaaatacgaaaacgaccgctaatagaaacgaacggggaaacgggggaaatagtatgggacaaagggcgagacttcgcgacggtacgaaaagtactaagcatgccgcaagtaaacatagtaaaaaaaacggaagtacaaacgggggggttcagcaaagaaagcatactaccgaaacgaaacagcgacaaactaatagcgcgaaaaaaagactgggacccgaaaaaatacggggggttcgacagcccgacggtagcgtacagcgtactagtagtagcgaaagtagaaaaagggaaaagcaaaaaactaaaaagcgtaaaagaactactagggataacgataatggaacgaagcagcttcgaaaaaaacccgatagacttcctagaagcgaaagggtacaaagaagtaaaaaaagacctaataataaaactaccgaaatacagcctattcgaactagaaaacgggcgaaaacgaatgctagcgagcgcgggggaactacaaaaagggaacgaactagcgctaccgagcaaatacgtaaacttcctatacctagcgagccactacgaaaaactaaaagggagcccggaagacaacgaacaaaaacaactattcgtagaacaacacaaacactacctagacgaaataatagaacaaataagcgaattcagcaaacgagtaatactagcggacgcgaacctagacaaagtactaagcgcgtacaacaaacaccgagacaaaccgatacgagaacaagcggaaaacataatacacctattcacgctaacgaacctaggggcgccggcggcgttcaaatacttcgacacgacgatagaccgaaaacgatacacgagcacgaaagaagtactagacgcgacgctaatacaccaaagcataacggggctatacgaaacgcgaatagacctaagccaactagggggggacgggggggggagcccgaaaaaaaaacgaaaagtatgactagccatcacatttaaaagcatctcagcctaccatgagaataagagaaagaaaatgaagatcaatagcttattcatctctttttctttttcgttggtgtaaagccaacaccctgtctaaaaaacataaatttctttaatcattttgcctcttttctctgtgcttcaattaataaaaaatggaaagaacctcgag

SEQ ID NO: 1354 - DNA, 4411 bp, synthetic construct
  misc_feature 1..4411: note = Synthetic
  source 1..4411: mol_type = other DNA
aggtcccgcagtcggcgtccagcggctctgcttgttcgtgtgtgtgtcgttgcaggccttattcggatccgccaccatggacaagaagtacagcatcggactggacatcggaacaaacagcgtcggatgggcagtcatcacagacgaatacaaggtcccgagcaagaagttcaaggtcctgggaaacacagacagacacagcatcaagaagaacctgatcggagcactgctgttcgacagcggagaaacagcagaagcaacaagactgaagagaacagcaagaagaagatacacaagaagaaagaacagaatctgctacctgcaggaaatcttcagcaacgaaatggcaaaggtcgacgacagcttcttccacagactggaagaaagcttcctggtcgaagaagacaagaagcacgaaagacacccgatcttcggaaacatcgtcgacgaagtcgcataccacgaaaagtacccgacaatctaccacctgagaaagaagctggtcgacagcacagacaaggcagacctgagactgatctacctggcactggcacacatgatcaagttcagaggacacttcctgatcgaaggagacctgaacccggacaacagcgacgtcgacaagctgttcatccagctggtccagacatacaaccagctgttcgaagaaaacccgatcaacgcaagcggagtcgacgcaaaggcaatcctgagcgcaagactgagcaagagcagaagactggaaaacctgatcgcacagctgccgggagaaaagaagaacggactgttcggaaacctgatcgcactgagcctgggactgacaccgaacttcaagagcaacttcgacctggcagaagacgcaaagctgcagctgagcaaggacacatacgacgacgacctggacaacctgctggcacagatcggagaccagtacgcagacctgttcctggcagcaaagaacctgagcgacgcaatcctgctgagcgacatcctgagagtcaacacagaaatcacaaaggcaccgctgagcgcaagcatgatcaagagatacgacgaacaccaccaggacctgacactgctgaaggcactggtcagacagcagctgccggaaaagtacaaggaaatcttcttcgaccagagcaagaacggatacgcaggatacatcgacggaggagcaagccaggaagaattctacaagttcatcaagccgatcctggaaaagatggacggaacagaagaactgctggtcaagctgaacagagaagacctgctgagaaagcagagaacattcgacaacggaagcatcccgcaccagatccacctgggagaactgcacgcaatcctgagaagacaggaagacttctacccgttcctgaaggacaacagagaaaagatcgaaaagatcctgacattcagaatcccgtactacgtcggaccgctggcaagaggaaacagcagattcgcatggatgacaagaaagagcgaagaaacaatcacaccgtggaacttcgaagaagtcgtcgacaagggagcaagcgcacagagcttcatcgaaagaatgacaaacttcgacaagaacctgccgaacgaaaaggtcctgccgaagcacagcctgctgtacgaatacttcacagtctacaacgaactgacaaaggtcaagtacgtcacagaaggaatgagaaagccggcattcctgagcggagaacagaagaaggcaatcgtcgacctgctgttcaagacaaacagaaaggtcacagtcaagcagctgaaggaagactacttcaagaagatcgaatgcttcgacagcgtcgaaatcagcggagtcgaagacagattcaacgcaagcctgggaacataccacgacctgctgaagatcatcaaggacaaggacttcctggacaacgaagaaaacgaagacatcctggaagacatcgtcctgacactgacactgttcgaagacagagaaatgatcgaagaaagactgaagacatacgcacacctgttcgacgacaaggtcatgaagcagctgaagagaagaagatacacaggatggggaagactgagcagaaagctgatcaacggaatcagagacaagcagagcggaaagacaatcctggacttcctgaagagcgacggattcgcaaacagaaacttcatgcagctgatccacgacgacagcctgacattcaaggaagacatccagaaggcacaggtcagcggacagggagacagcctgcacgaacacatcgcaaacctggcaggaagcccggcaatcaagaagggaatcctgcagacagtcaaggtcgtcgacgaactggtcaaggtcatgggaagacacaagccggaaaacatcgtcatcgaaatggcaagagaaaaccagacaacacagaagggacagaagaacagcagagaaagaatgaagagaatcgaagaaggaatcaaggaactgggaagccagatcctgaaggaacacccggtcgaaaacacacagctgcagaacgaaaagctgtacctgtactacctgcagaacggaagagacatgtacgtcgaccaggaactggacatcaacagactgagcgactacgacgtcgaccacatcgtcccgcagagcttcctgaaggacgacagcatcgacaacaaggtcctgacaagaagcgacaagaacagaggaaagagcgacaacgtcccgagcgaagaagtcgtcaagaagatgaagaactactggagacagctgctgaacgcaaagctgatcacacagagaaagttcgacaacctgacaaaggcagagagaggaggactgagcgaactggacaaggcaggattcatcaagagacagctggtcgaaacaagacagatcacaaagcacgtcgcacagatcctggacagcagaatgaacacaaagtacgacgaaaacgacaagctgatcagagaagtcaaggtcatcacactgaagagcaagctggtcagcgacttcagaaaggacttccagttctacaaggtcagagaaatcaacaactaccaccacgcacacgacgcatacctgaacgcagtcgtcggaacagcactgatcaagaagtacccgaagctggaaagcgaattcgtctacggagactacaaggtctacgacgtcagaaagatgatcgcaaagagcgaacaggaaatcggaaaggcaacagcaaagtacttcttctacagcaacatcatgaacttcttcaagacagaaatcacactggcaaacggagaaatcagaaagagaccgctgatcgaaacaaacggagaaacaggagaaatcgtctgggacaagggaagagacttcgcaacagtcagaaaggtcctgagcatgccgcaggtcaacatcgtcaagaagacagaagtccagacaggaggattcagcaaggaaagcatcctgccgaagagaaacagcgacaagctgatcgcaagaaagaaggactgggacccgaagaagtacggaggattcgacagcccgacagtcgcatacagcgtcctggtcgtcgcaaaggtcgaaaagggaaagagcaagaagctgaagagcgtcaaggaactgctgggaatcacaatcatggaaagaagcagcttcgaaaagaacccgatcgacttcctggaagcaaagggatacaaggaagtcaagaaggacctgatcatcaagctgccgaagtacagcctgttcgaactggaaaacggaagaaagagaatgctggcaagcgcaggagaactgcagaagggaaacgaactggcactgccgagcaagtacgtcaacttcctgtacctggcaagccactacgaaaagctgaagggaagcccggaagacaacgaacagaagcagctgttcgtcgaacagcacaagcactacctggacgaaatcatcgaacagatcagcgaattcagcaagagagtcatcctggcagacgcaaacctggacaaggtcctgagcgcatacaacaagcacagagacaagccgatcagagaacaggcagaaaacatcatccacctgttcacactgacaaacctgggagcaccggcagcattcaagtacttcgacacaacaatcgacagaaagagatacacaagcacaaaggaagtcctggacgcaacactgatccaccagagcatcacaggactgtacgaaacaagaatcgacctgagccagctgggaggagacggaggaggaagcccgaagaagaagagaaaggtctagctagccatcacatttaaaagcatctcagcctaccatgagaataagagaaagaaaatgaagatcaatagcttattcatctctttttctttttcgttggtgtaaagccaacaccctgtctaaaaaacataaatttctttaatcattttgcctcttttctctgtgcttcaattaataaaaaatggaaagaacctcgag

SEQ ID NO: 1355 - DNA, 4481 bp, synthetic construct
  misc_feature 1..4481: note = Synthetic
  source 1..4481: mol_type = other DNA
gggcagatcgcctggagacgccatccacgctgttttgacctccatagaagacaccgggaccgatccagcctccgcggccgggaacggtgcattggaacgcggattccccgtgccaagagtgactcaccgtccttgacacggccaccatggacaagaagtacagcatcggactggacatcggaacaaacagcgtcggatgggcagtcatcacagacgaatacaaggtcccgagcaagaagttcaaggtcctgggaaacacagacagacacagcatcaagaagaacctgatcggagcactgctgttcgacagcggagaaacagcagaagcaacaagactgaagagaacagcaagaagaagatacacaagaagaaagaacagaatctgctacctgcaggaaatcttcagcaacgaaatggcaaaggtcgacgacagcttcttccacagactggaagaaagcttcctggtcgaagaagacaagaagcacgaaagacacccgatcttcggaaacatcgtcgacgaagtcgcataccacgaaaagtacccgacaatctaccacctgagaaagaagctggtcgacagcacagacaaggcagacctgagactgatctacctggcactggcacacatgatcaagttcagaggacacttcctgatcgaaggagacctgaacccggacaacagcgacgtcgacaagctgttcatccagctggtccagacatacaaccagctgttcgaagaaaacccgatcaacgcaagcggagtcgacgcaaaggcaatcctgagcgcaagactgagcaagagcagaagactggaaaacctgatcgcacagctgccgggagaaaagaagaacggactgttcggaaacctgatcgcactgagcctgggactgacaccgaacttcaagagcaacttcgacctggcagaagacgcaaagctgcagctgagcaaggacacatacgacgacgacctggacaacctgctggcacagatcggagaccagtacgcagacctgttcctggcagcaaagaacctgagcgacgcaatcctgctgagcgacatcctgagagtcaacacagaaatcacaaaggcaccgctgagcgcaagcatgatcaagagatacgacgaacaccaccaggacctgacactgctgaaggcactggtcagacagcagctgccggaaaagtacaaggaaatcttcttcgaccagagcaagaacggatacgcaggatacatcgacggaggagcaagccaggaagaattctacaagttcatcaagccgatcctggaaaagatggacggaacagaagaactgctggtcaagctgaacagagaagacctgctgagaaagcagagaacattcgacaacggaagcatcccgcaccagatccacctgggagaactgcacgcaatcctgagaagacaggaagacttctacccgttcctgaaggacaacagagaaaagatcgaaaagatcctgacattcagaatcccgtactacgtcggaccgctggcaagaggaaacagcagattcgcatggatgacaagaaagagcgaagaaacaatcacaccgtggaacttcgaagaagtcgtcgacaagggagcaagcgcacagagcttcatcgaaagaatgacaaacttcgacaagaacctgccgaacgaaaaggtcctgccgaagcacagcctgctgtacgaatacttcacagtctacaacgaactgacaaaggtcaagtacgtcacagaaggaatgagaaagccggcattcctgagcggagaacagaagaaggcaatcgtcgacctgctgttcaagacaaacagaaaggtcacagtcaagcagctgaaggaagactacttcaagaagatcgaatgcttcgacagcgtcgaaatcagcggagtcgaagacagattcaacgcaagcctgggaacataccacgacctgctgaagatcatcaaggacaaggacttcctggacaacgaagaaaacgaagacatcctggaagacatcgtcctgacactgacactgttcgaagacagagaaatgatcgaagaaagactgaagacatacgcacacctgttcgacgacaaggtcatgaagcagctgaagagaagaagatacacaggatggggaagactgagcagaaagctgatcaacggaatcagagacaagcagagcggaaagacaatcctggacttcctgaagagcgacggattcgcaaacagaaacttcatgcagctgatccacgacgacagcctgacattcaaggaagacatccagaaggcacaggtcagcggacagggagacagcctgcacgaacacatcgcaaacctggcaggaagcccggcaatcaagaagggaatcctgcagacagtcaaggtcgtcgacgaactggtcaaggtcatgggaagacacaagccggaaaacatcgtcatcgaaatggcaagagaaaaccagacaacacagaagggacagaagaacagcagagaaagaatgaagagaatcgaagaaggaatcaaggaactgggaagccagatcctgaaggaacacccggtcgaaaacacacagctgcagaacgaaaagctgtacctgtactacctgcagaacggaagagacatgtacgtcgaccaggaactggacatcaacagactgagcgactacgacgtcgaccacatcgtcccgcagagcttcctgaaggacgacagcatcgacaacaaggtcctgacaagaagcgacaagaacagaggaaagagcgacaacgtcccgagcgaagaagtcgtcaagaagatgaagaactactggagacagctgctgaacgcaaagctgatcacacagagaaagttcgacaacctgacaaaggcagagagaggaggactgagcgaactggacaaggcaggattcatcaagagacagctggtcgaaacaagacagatcacaaagcacgtcgcacagatcctggacagcagaatgaacacaaagtacgacgaaaacgacaagctgatcagagaagtcaaggtcatcacactgaagagcaagctggtcagcgacttcagaaaggacttccagttctacaaggtcagagaaatcaacaactaccaccacgcacacgacgcatacctgaacgcagtcgtcggaacagcactgatcaagaagtacccgaagctggaaagcgaattcgtctacggagactacaaggtctacgacgtcagaaagatgatcgcaaagagcgaacaggaaatcggaaaggcaacagcaaagtacttcttctacagcaacatcatgaacttcttcaagacagaaatcacactggcaaacggagaaatcagaaagagaccgctgatcgaaacaaacggagaaacaggagaaatcgtctgggacaagggaagagacttcgcaacagtcagaaaggtcctgagcatgccgcaggtcaacatcgtcaagaagacagaagtccagacaggaggattcagcaaggaaagcatcctgccgaagagaaacagcgacaagctgatcgcaagaaagaaggactgggacccgaagaagtacggaggattcgacagcccgacagtcgcatacagcgtcctggtcgtcgcaaaggtcgaaaagggaaagagcaagaagctgaagagcgtcaaggaactgctgggaatcacaatcatggaaagaagcagcttcgaaaagaacccgatcgacttcctggaagcaaagggatacaaggaagtcaagaaggacctgatcatcaagctgccgaagtacagcctgttcgaactggaaaacggaagaaagagaatgctggcaagcgcaggagaactgcagaagggaaacgaactggcactgccgagcaagtacgtcaacttcctgtacctggcaagccactacgaaaagctgaagggaagcccggaagacaacgaacagaagcagctgttcgtcgaacagcacaagcactacctggacgaaatcatcgaacagatcagcgaattcagcaagagagtcatcctggcagacgcaaacctggacaaggtcctgagcgcatacaacaagcacagagacaagccgatcagagaacaggcagaaaacatcatccacctgttcacactgacaaacctgggagcaccggcagcattcaagtacttcgacacaacaatcgacagaaagagatacacaagcacaaaggaagtcctggacgcaacactgatccaccagagcatcacaggactgtacgaaacaagaatcgacctgagccagctgggaggagacggaggaggaagcccgaagaagaagagaaaggtctagctagccatcacatttaaaagcatctcagcctaccatgagaataagagaaagaaaatgaagatcaatagcttattcatctctttttctttttcgttggtgtaaagccaacaccctgtctaaaaaacataaatttctttaatcattttgcctcttttctctgtgcttcaattaataaaaaatggaaagaacctcgag

SEQ ID NO: 1356 - DNA, 4348 bp, synthetic construct
  misc_feature 1..4348: note = Synthetic
  source 1..4348: mol_type = other DNA
gggacatttgcttctgacacaactgtgttcactagcaacctcaaacagacaccggatctgccaccatggacaagaagtacagcatcggactggacatcggaacaaacagcgtcggatgggcagtcatcacagacgaatacaaggtcccgagcaagaagttcaaggtcctgggaaacacagacagacacagcatcaagaagaacctgatcggagcactgctgttcgacagcggagaaacagcagaagcaacaagactgaagagaacagcaagaagaagatacacaagaagaaagaacagaatctgctacctgcaggaaatcttcagcaacgaaatggcaaaggtcgacgacagcttcttccacagactggaagaaagcttcctggtcgaagaagacaagaagcacgaaagacacccgatcttcggaaacatcgtcgacgaagtcgcataccacgaaaagtacccgacaatctaccacctgagaaagaagctggtcgacagcacagacaaggcagacctgagactgatctacctggcactggcacacatgatcaagttcagaggacacttcctgatcgaaggagacctgaacccggacaacagcgacgtcgacaagctgttcatccagctggtccagacatacaaccagctgttcgaagaaaacccgatcaacgcaagcggagtcgacgcaaaggcaatcctgagcgcaagactgagcaagagcagaagactggaaaacctgatcgcacagctgccgggagaaaagaagaacggactgttcggaaacctgatcgcactgagcctgggactgacaccgaacttcaagagcaacttcgacctggcagaagacgcaaagctgcagctgagcaaggacacatacgacgacgacctggacaacctgctggcacagatcggagaccagtacgcagacctgttcctggcagcaaagaacctgagcgacgcaatcctgctgagcgacatcctgagagtcaacacagaaatcacaaaggcaccgctgagcgcaagcatgatcaagagatacgacgaacaccaccaggacctgacactgctgaaggcactggtcagacagcagctgccggaaaagtacaaggaaatcttcttcgaccagagcaagaacggatacgcaggatacatcgacggaggagcaagccaggaagaattctacaagttcatcaagccgatcctggaaaagatggacggaacagaagaactgctggtcaagctgaacagagaagacctgctgagaaagcagagaacattcgacaacggaagcatcccgcaccagatccacctgggagaactgcacgcaatcctgagaagacaggaagacttctacccgttcctgaaggacaacagagaaaagatcgaaaagatcctgacattcagaatcccgtactacgtcggaccgctggcaagaggaaacagcagattcgcatggatgacaagaaagagcgaagaaacaatcacaccgtggaacttcgaagaagtcgtcgacaagggagcaagcgcacagagcttcatcgaaagaatgacaaacttcgacaagaacctgccgaacgaaaaggtcctgccgaagcacagcctgctgtacgaatacttcacagtctacaacgaactgacaaaggtcaagtacgtcacagaaggaatgagaaagccggcattcctgagcggagaacagaagaaggcaatcgtcgacctgctgttcaagacaaacagaaaggtcacagtcaagcagctgaaggaagactacttcaagaagatcgaatgcttcgacagcgtcgaaatcagcggagtcgaagacagattcaacgcaagcctgggaacataccacgacctgctgaagatcatcaaggacaaggacttcctggacaacgaagaaaacgaagacatcctggaagacatcgtcctgacactgacactgttcgaagacagagaaatgatcgaagaaagactgaagacatacgcacacctgttcgacgacaaggtcatgaagcagctgaagagaagaagatacacaggatggggaagactgagcagaaagctgatcaacggaatcagagacaagcagagcggaaagacaatcctggacttcctgaagagcgacggattcgcaaacagaaacttcatgcagctgatccacgacgacagcctgacattcaaggaagacatccagaaggcacaggtcagcggacagggagacagcctgcacgaacacatcgcaaacctggcaggaagcccggcaatcaagaagggaatcctgcagacagtcaaggtcgtcgacgaactggtcaaggtcatgggaagacacaagccggaaaacatcgtcatcgaaatggcaagagaaaaccagacaacacagaagggacagaagaacagcagagaaagaatgaagagaatcgaagaaggaatcaaggaactgggaagccagatcctgaaggaacacccggtcgaaaacacacagctgcagaacgaaaagctgtacctgtactacctgcagaacggaagagacatgtacgtcgaccaggaactggacatcaacagactgagcgactacgacgtcgaccacatcgtcccgcagagcttcctgaaggacgacagcatcgacaacaaggtcctgacaagaagcgacaagaacagaggaaagagcgacaacgtcccgagcgaagaagtcgtcaagaagatgaagaactactggagacagctgctgaacgcaaagctgatcacacagagaaagttcgacaacctgacaaaggcagagagaggaggactgagcgaactggacaaggcaggattcatcaagagacagctggtcgaaacaagacagatcacaaagcacgtcgcacagatcctggacagcagaatgaacacaaagtacgacgaaaacgacaagctgatcagagaagtcaaggtcatcacactgaagagcaagctggtcagcgacttcagaaaggacttccagttctacaaggtcagagaaatcaacaactaccaccacgcacacgacgcatacctgaacgcagtcgtcggaacagcactgatcaagaagtacccgaagctggaaagcgaattcgtctacggagactacaaggtctacgacgtcagaaagatgatcgcaaagagcgaacaggaaatcggaaaggcaacagcaaagtacttcttctacagcaacatcatgaacttcttcaagacagaaatcacactggcaaacggagaaatcagaaagagaccgctgatcgaaacaaacggagaaacaggagaaatcgtctgggacaagggaagagacttcgcaacagtcagaaaggtcctgagcatgccgcaggtcaacatcgtcaagaagacagaagtccagacaggaggattcagcaaggaaagcatcctgccgaagagaaacagcgacaagctgatcgcaagaaagaaggactgggacccgaagaagtacggaggattcgacagcccgacagtcgcatacagcgtcctggtcgtcgcaaaggtcgaaaagggaaagagcaagaagctgaagagcgtcaaggaactgctgggaatcacaatcatggaaagaagcagcttcgaaaagaacccgatcgacttcctggaagcaaagggatacaaggaagtcaagaaggacctgatcatcaagctgccgaagtacagcctgttcgaactggaaaacggaagaaagagaatgctggcaagcgcaggagaactgcagaagggaaacgaactggcactgccgagcaagtacgtcaacttcctgtacctggcaagccactacgaaaagctgaagggaagcccggaagacaacgaacagaagcagctgttcgtcgaacagcacaagcactacctggacgaaatcatcgaacagatcagcgaattcagcaagagagtcatcctggcagacgcaaacctggacaaggtcctgagcgcatacaacaagcacagagacaagccgatcagagaacaggcagaaaacatcatccacctgttcacactgacaaacctgggagcaccggcagcattcaagtacttcgacacaacaatcgacagaaagagatacacaagcacaaaggaagtcctggacgcaacactgatccaccagagcatcacaggactgtacgaaacaagaatcgacctgagccagctgggaggagacggaggaggaagcccgaagaagaagagaaaggtctagctagcgctcgctttcttgctgtccaatttctattaaaggttcctttgttccctaagtccaactactaaactgggggatattatgaagggccttgagcatctggattctgcctaataaaaaacatttattttcattgcctcgag

SEQ ID NO: 1357 - DNA, 4325 bp, synthetic construct
  misc_feature 1..4325: note = Synthetic
  source 1..4325: mol_type = other DNA
gggaagctcagaataaacgctcaactttggccggatctgccaccatggacaagaagtacagcatcggactggacatcggaacaaacagcgtcggatgggcagtcatcacagacgaatacaaggtcccgagcaagaagttcaaggtcctgggaaacacagacagacacagcatcaagaagaacctgatcggagcactgctgttcgacagcggagaaacagcagaagcaacaagactgaagagaacagcaagaagaagatacacaagaagaaagaacagaatctgctacctgcaggaaatcttcagcaacgaaatggcaaaggtcgacgacagcttcttccacagactggaagaaagcttcctggtcgaagaagacaagaagcacgaaagacacccgatcttcggaaacatcgtcgacgaagtcgcataccacgaaaagtacccgacaatctaccacctgagaaagaagctggtcgacagcacagacaaggcagacctgagactgatctacctggcactggcacacatgatcaagttcagaggacacttcctgatcgaaggagacctgaacccggacaacagcgacgtcgacaagctgttcatccagctggtccagacatacaaccagctgttcgaagaaaacccgatcaacgcaagcggagtcgacgcaaaggcaatcctgagcgcaagactgagcaagagcagaagactggaaaacctgatcgcacagctgccgggagaaaagaagaacggactgttcggaaacctgatcgcactgagcctgggactgacaccgaacttcaagagcaacttcgacctggcagaagacgcaaagctgcagctgagcaaggacacatacgacgacgacctggacaacctgctggcacagatcggagaccagtacgcagacctgttcctggcagcaaagaacctgagcgacgcaatcctgctgagcgacatcctgagagtcaacacagaaatcacaaaggcaccgctgagcgcaagcatgatcaagagatacgacgaacaccaccaggacctgacactgctgaaggcactggtcagacagcagctgccggaaaagtacaaggaaatcttcttcgaccagagcaagaacggatacgcaggatacatcgacggaggagcaagccaggaagaattctacaagttcatcaagccgatcctggaaaagatggacggaacagaagaactgctggtcaagctgaacagagaagacctgctgagaaagcagagaacattcgacaacggaagcatcccgcaccagatccacctgggagaactgcacgcaatcctgagaagacaggaagacttctacccgttcctgaaggacaacagagaaaagatcgaaaagatcctgacattcagaatcccgtactacgtcggaccgctggcaagaggaaacagcagattcgcatggatgacaagaaagagcgaagaaacaatcacaccgtggaacttcgaagaagtcgtcgacaagggagcaagcgcacagagcttcatcgaaagaatgacaaacttcgacaagaacctgccgaacgaaaaggtcctgccgaagcacagcctgctgtacgaatacttcacagtctacaacgaactgacaaaggtcaagtacgtcacagaaggaatgagaaagccggcattcctgagcggagaacagaagaaggcaatcgtcgacctgctgttcaagacaaacagaaaggtcacagtcaagcagctgaaggaagactacttcaagaagatcgaatgcttcgacagcgtcgaaatcagcggagtcgaagacagattcaacgcaagcctgggaacataccacgacctgctgaagatcatcaaggacaaggacttcctggacaacgaagaaaacgaagacatcctggaagacatcgtcctgacactgacactgttcgaagacagagaaatgatcgaagaaagactgaagacatacgcacacctgttcgacgacaaggtcatgaagcagctgaagagaagaagatacacaggatggggaagactgagcagaaagctgatcaacggaatcagagacaagcagagcggaaagacaatcctggacttcctgaagagcgacggattcgcaaacagaaacttcatgcagctgatccacgacgacagcctgacattcaaggaagacatccagaaggcacaggtcagcggacagggagacagcctgcacgaacacatcgcaaacctggcaggaagcccggcaatcaagaagggaatcctgcagacagtcaaggtcgtcgacgaactggtcaaggtcatgggaagacacaagccggaaaacatcgtcatcgaaatggcaagagaaaaccagacaacacagaagggacagaagaacagcagagaaagaatgaagagaatcgaagaaggaatcaaggaactgggaagccagatcctgaaggaacacccggtcgaaaacacacagctgcagaacgaaaagctgtacctgtactacctgcagaacggaagagacatgtacgtcgaccaggaactggacatcaacagactgagcgactacgacgtcgaccacatcgtcccgcagagcttcctgaaggacgacagcatcgacaacaaggtcctgacaagaagcgacaagaacagaggaaagagcgacaacgtcccgagcgaagaagtcgtcaagaagatgaagaactactggagacagctgctgaacgcaaagctgatcacacagagaaagttcgacaacctgacaaaggcagagagaggaggactgagcgaactggacaaggcaggattcatcaagagacagctggtcgaaacaagacagatcacaaagcacgtcgcacagatcctggacagcagaatgaacacaaagtacgacgaaaacgacaagctgatcagagaagtcaaggtcatcacactgaagagcaagctggtcagcgacttcagaaaggacttccagttctacaaggtcagagaaatcaacaactaccaccacgcacacgacgcatacctgaacgcagtcgtcggaacagcactgatcaagaagtacccgaagctggaaagcgaattcgtctacggagactacaaggtctacgacgtcagaaagatgatcgcaaagagcgaacaggaaatcggaaaggcaacagcaaagtacttcttctacagcaacatcatgaacttcttcaagacagaaatcacactggcaaacggagaaatcagaaagagaccgctgatcgaaacaaacggagaaacaggagaaatcgtctgggacaagggaagagacttcgcaacagtcagaaaggtcctgagcatgccgcaggtcaacatcgtcaagaagacagaagtccagacaggaggattcagcaaggaaagcatcctgccgaagagaaacagcgacaagctgatcgcaagaaagaaggactgggacccgaagaagtacggaggattcgacagcccgacagtcgcatacagcgtcctggtcgtcgcaaaggtcgaaaagggaaagagcaagaagctgaagagcgtcaaggaactgctgggaatcacaatcatggaaagaagcagcttcgaaaagaacccgatcgacttcctggaagcaaagggatacaaggaagtcaagaaggacctgatcatcaagctgccgaagtacagcctgttcgaactggaaaacggaagaaagagaatgctggcaagcgcaggagaactgcagaagggaaacgaactggcactgccgagcaagtacgtcaacttcctgtacctggcaagccactacgaaaagctgaagggaagcccggaagacaacgaacagaagcagctgttcgtcgaacagcacaagcactacctggacgaaatcatcgaacagatcagcgaattcagcaagagagtcatcctggcagacgcaaacctggacaaggtcctgagcgcatacaacaagcacagagacaagccgatcagagaacaggcagaaaacatcatccacctgttcacactgacaaacctgggagcaccggcagcattcaagtacttcgacacaacaatcgacagaaagagatacacaagcacaaaggaagtcctggacgcaacactgatccaccagagcatcacaggactgtacgaaacaagaatcgacctgagccagctgggaggagacggaggaggaagcccgaagaagaagagaaaggtctagctagcaccagcctcaagaacacccgaatggagtctctaagctacataataccaacttacactttacaaaatgttgtcccccaaaatgtagccattcgtatctgctcctaataaaaagaaagtttcttcacattctctcgag

SEQ ID NO: 1358 - DNA, 4325 bp, synthetic construct
  misc_feature 1..4325: note = Synthetic
  source 1..4325: mol_type = other DNA
aggaagctcagaataaacgctcaactttggccggatctgccaccatggacaagaagtacagcatcggactggacatcggaacaaacagcgtcggatgggcagtcatcacagacgaatacaaggtcccgagcaagaagttcaaggtcctgggaaacacagacagacacagcatcaagaagaacctgatcggagcactgctgttcgacagcggagaaacagcagaagcaacaagactgaagagaacagcaagaagaagatacacaagaagaaagaacagaatctgctacctgcaggaaatcttcagcaacgaaatggcaaaggtcgacgacagcttcttccacagactggaagaaagcttcctggtcgaagaagacaagaagcacgaaagacacccgatcttcggaaacatcgtcgacgaagtcgcataccacgaaaagtacccgacaatctaccacctgagaaagaagctggtcgacagcacagacaaggcagacctgagactgatctacctggcactggcacacatgatcaagttcagaggacacttcctgatcgaaggagacctgaacccggacaacagcgacgtcgacaagctgttcatccagctggtccagacatacaaccagctgttcgaagaaaacccgatcaacgcaagcggagtcgacgcaaaggcaatcctgagcgcaagactgagcaagagcagaagactggaaaacctgatcgcacagctgccgggagaaaagaagaacggactgttcggaaacctgatcgcactgagcctgggactgacaccgaacttcaagagcaacttcgacctggcagaagacgcaaagctgcagctgagcaaggacacatacgacgacgacctggacaacctgctggcacagatcggagaccagtacgcagacctgttcctggcagcaaagaacctgagcgacgcaatcctgctgagcgacatcctgagagtcaacacagaaatcacaaaggcaccgctgagcgcaagcatgatcaagagatacgacgaacaccaccaggacctgacactgctgaaggcactggtcagacagcagctgccggaaaagtacaaggaaatcttcttcgaccagagcaagaacggatacgcaggatacatcgacggaggagcaagccaggaagaattctacaagttcatcaagccgatcctggaaaagatggacggaacagaagaactgctggtcaagctgaacagagaagacctgctgagaaagcagagaacattcgacaacggaagcatcccgcaccagatccacctgggagaactgcacgcaatcctgagaagacaggaagacttctacccgttcctgaaggacaacagagaaaagatcgaaaagatcctgacattcagaatcccgtactacgtcggaccgctggcaagaggaaacagcagattcgcatggatgacaagaaagagcgaagaaacaatcacaccgtggaacttcgaagaagtcgtcgacaagggagcaagcgcacagagcttcatcgaaagaatgacaaacttcgacaagaacctgccgaacgaaaaggtcctgccgaagcacagcctgctgtacgaatacttcacagtctacaacgaactgacaaaggtcaagtacgtcacagaaggaatgagaaagccggcattcctgagcggagaacagaagaaggcaatcgtcgacctgctgttcaagacaaacagaaaggtcacagtcaagcagctgaaggaagactacttcaagaagatcgaatgcttcgacagcgtcgaaatcagcggagtcgaagacagattcaacgcaagcctgggaacataccacgacctgctgaagatcatcaaggacaaggacttcctggacaacgaagaaaacgaagacatcctggaagacatcgtcctgacactgacactgttcgaagacagagaaatgatcgaagaaagactgaagacatacgcacacctgttcgacgacaaggtcatgaagcagctgaagagaagaagatacacaggatggggaagactgagcagaaagctgatcaacggaatcagagacaagcagagcggaaagacaatcctggacttcctgaagagcgacggattcgcaaacagaaacttcatgcagctgatccacgacgacagcctgacattcaaggaagacatccagaaggcacaggtcagcggacagggagacagcctgcacgaacacatcgcaaacctggcaggaagcccggcaatcaagaagggaatcctgcagacagtcaaggtcgtcgacgaactggtcaaggtcatgggaagacacaagccggaaaacatcgtcatcgaaatggcaagagaaaaccagacaacacagaagggacagaagaacagcagagaaagaatgaagagaatcgaagaaggaatcaaggaactgggaagccagatcctgaaggaacacccggtcgaaaacacacagctgcagaacgaaaagctgtacctgtactacctgcagaacggaagagacatgtacgtcgaccaggaactggacatcaacagactgagcgactacgacgtcgaccacatcgtcccgcagagcttcctgaaggacgacagcatcgacaacaaggtcctgacaagaagcgacaagaacagaggaaagagcgacaacgtcccgagcgaagaagtcgtcaagaagatgaagaactactggagacagctgctgaacgcaaagctgatcacacagagaaagttcgacaacctgacaaaggcagagagaggaggactgagcgaactggacaaggcaggattcatcaagagacagctggtcgaaacaagacagatcacaaagcacgtcgcacagatcctggacagcagaatgaacacaaagtacgacgaaaacgacaagctgatcagagaagtcaaggtcatcacactgaagagcaagctggtcagcgacttcagaaaggacttccagttctacaaggtcagagaaatcaacaactaccaccacgcacacgacgcatacctgaacgcagtcgtcggaacagcactgatcaagaagtacccgaagctggaaagcgaattcgtctacggagactacaaggtctacgacgtcagaaagatgatcgcaaagagcgaacaggaaatcggaaaggcaacagcaaagtacttcttctacagcaacatcatgaacttcttcaagacagaaatcacactggcaaacggagaaatcagaaagagaccgctgatcgaaacaaacggagaaacaggagaaatcgtctgggacaagggaagagacttcgcaacagtcagaaaggtcctgagcatgccgcaggtcaacatcgtcaagaagacagaagtccagacaggaggattcagcaaggaaagcatcctgccgaagagaaacagcgacaagctgatcgcaagaaagaaggactgggacccgaagaagtacggaggattcgacagcccgacagtcgcatacagcgtcctggtcgtcgcaaaggtcgaaaagggaaagagcaagaagctgaagagcgtcaaggaactgctgggaatcacaatcatggaaagaagcagcttcgaaaagaacccgatcgacttcctggaagcaaagggatacaaggaagtcaagaaggacctgatcatcaagctgccgaagtacagcctgttcgaactggaaaacggaagaaagagaatgctggcaagcgcaggagaactgcagaagggaaacgaactggcactgccgagcaagtacgtcaacttcctgtacctggcaagccactacgaaaagctgaagggaagcccggaagacaacgaacagaagcagctgttcgtcgaacagcacaagcactacctggacgaaatcatcgaacagatcagcgaattcagcaagagagtcatcctggcagacgcaaacctggacaaggtcctgagcgcatacaacaagcacagagacaagccgatcagagaacaggcagaaaacatcatccacctgttcacactgacaaacctgggagcaccggcagcattcaagtacttcgacacaacaatcgacagaaagagatacacaagcacaaaggaagtcctggacgcaacactgatccaccagagcatcacaggactgtacgaaacaagaatcgacctgagccagctgggaggagacggaggaggaagcccgaagaagaagagaaaggtctagctagcaccagcctcaagaacacccgaatggagtctctaagctacataataccaacttacactttacaaaatgttgtcccccaaaatgtagccattcgtatctgctcctaataaaaagaaagtttcttcacattctctcgag

SEQ ID NO: 1359 - DNA, 4411 bp, synthetic construct; identical to SEQ ID NO: 1354
  misc_feature 1..4411: note = Synthetic
  source 1..4411: mol_type = other DNA

SEQ ID NO: 1360 - RNA, 80 nt, synthetic construct; identical to SEQ ID NO: 30
  misc_feature 1..80: note = Synthetic
  modified_base 9..20: mod_base = OTHER; note = 2' O-methyl nucleotide
  modified_base 49..80: mod_base = OTHER; note = 2' O-methyl nucleotide
  modified_base 77..79: mod_base = OTHER; note = phosphorothioate linkage
  source 1..80: mol_type = other RNA

SEQ ID NO: 1361 - RNA, 100 nt, synthetic construct
  misc_feature 1..100: note = Synthetic
  modified_base 29..40: mod_base = OTHER; note = 2' O-methyl nucleotide
  modified_base 69..100: mod_base = OTHER; note = 2' O-methyl nucleotide
  modified_base 97..99: mod_base = OTHER; note = phosphorothioate linkage
  source 1..100: mol_type = other RNA
nnnnnnnnnnnnnnnnnnnngttttagagctagaaatagcaagttaaaataaggctagtccgttatcaacttgaaaaagtggcaccgagtcggtgctttt

SEQ ID NO: 1362 - RNA, 100 nt, synthetic construct; identical to SEQ ID NO: 1361
  misc_feature 1..100: note = Synthetic
  modified_base 1..3: mod_base = OTHER; note = 2' O-methyl nucleotide and phosphorothioate linkage
  modified_base 29..40: mod_base = OTHER; note = 2' O-methyl nucleotide
  modified_base 69..100: mod_base = OTHER; note = 2' O-methyl nucleotide
  modified_base 97..99: mod_base = OTHER; note = phosphorothioate linkage
  source 1..100: mol_type = other RNA

SEQ ID NO: 1363 - RNA, 81 nt, synthetic construct
  misc_feature 1..81: note = Synthetic
  modified_base 1: mod_base = OTHER; note = 2' O-methyl nucleotide
  modified_base 8..22: mod_base = OTHER; note = 2' O-methyl nucleotide
  modified_base 26: mod_base = OTHER; note = 2' O-methyl nucleotide
  modified_base 28: mod_base = OTHER; note = 2' O-methyl nucleotide
  modified_base 30: mod_base = OTHER; note = 2' O-methyl nucleotide
  modified_base 32..37: mod_base = OTHER; note = 2' O-methyl nucleotide
  modified_base 40..41: mod_base = OTHER; note = 2' O-methyl nucleotide
  modified_base 46..47: mod_base = OTHER; note = 2' O-methyl nucleotide
  modified_base 50: mod_base = OTHER; note = 2' O-methyl nucleotide and phosphorothioate linkage
  modified_base 51: mod_base = OTHER; note = 2' O-methyl nucleotide and phosphorothioate linkage
  modified_base 52: mod_base = OTHER; note = 2' O-methyl nucleotide and phosphorothioate linkage
  modified_base 53: mod_base = OTHER; note = 2' O-methyl nucleotide and phosphorothioate linkage
  modified_base 54: mod_base = OTHER; note = 2' O-methyl nucleotide and phosphorothioate linkage
  modified_base 55: mod_base = OTHER; note = 2' O-methyl nucleotide and phosphorothioate linkage
  modified_base 56: mod_base = OTHER; note = 2' O-methyl nucleotide and phosphorothioate linkage
  modified_base 57: mod_base = OTHER; note = 2' O-methyl nucleotide and phosphorothioate linkage
  modified_base 58: mod_base = OTHER; note = 2' O-methyl nucleotide and phosphorothioate linkage
  modified_base 59..61: mod_base = OTHER; note = 2' O-methyl nucleotide
  modified_base 62: mod_base = OTHER; note = 2' O-methyl nucleotide and phosphorothioate linkage
  modified_base 63: mod_base = OTHER; note = 2' O-methyl nucleotide
  modified_base 64: mod_base = OTHER; note = 2' O-methyl nucleotide and phosphorothioate linkage
  modified_base 65: mod_base = OTHER; note = 2' O-methyl nucleotide and phosphorothioate linkage
  modified_base 66: mod_base = OTHER; note = 2' O-methyl nucleotide and phosphorothioate linkage
  modified_base 67: mod_base = OTHER; note = 2' O-methyl nucleotide and phosphorothioate linkage
  modified_base 68: mod_base = OTHER; note = 2' O-methyl nucleotide and phosphorothioate linkage
  modified_base 69: mod_base = OTHER; note = 2' O-methyl nucleotide and phosphorothioate linkage
  modified_base 70: mod_base = OTHER; note = 2' O-methyl nucleotide and phosphorothioate linkage
  modified_base 71: mod_base = OTHER; note = 2' O-methyl nucleotide
  modified_base 72: mod_base = OTHER; note = 2' O-methyl nucleotide and phosphorothioate linkage
  modified_base 73: mod_base = OTHER; note = 2' O-methyl nucleotide and phosphorothioate linkage
  modified_base 74: mod_base = OTHER; note = 2' O-methyl nucleotide and phosphorothioate linkage
  modified_base 75: mod_base = OTHER; note = 2' O-methyl nucleotide and phosphorothioate linkage
  modified_base 76: mod_base = OTHER; note = 2' O-methyl nucleotide and phosphorothioate linkage
  modified_base 77: mod_base = OTHER; note = 2' O-methyl nucleotide and phosphorothioate linkage
  modified_base 78: mod_base = OTHER; note = 2' O-methyl nucleotide and phosphorothioate linkage
  modified_base 79: mod_base = OTHER; note = 2' O-methyl nucleotide and phosphorothioate linkage
  modified_base 80: mod_base = OTHER; note = 2' O-methyl nucleotide and phosphorothioate linkage
  modified_base 81: mod_base = OTHER; note = 2' O-methyl nucleotide
  source 1..81: mol_type = other RNA
gttttagagctagaaatagcaagttaaaataaggctagtccgttatcaacttgaaaaagtggcaccgagtcggtgcttttt

SEQ ID NO: 1364 - RNA, 101 nt, synthetic construct; identical to SEQ ID NO: 32
  misc_feature 1..101: note = Synthetic
  modified_base 21: mod_base = OTHER; note = 2' O-methyl nucleotide
  modified_base 28..42: mod_base = OTHER; note = 2' O-methyl nucleotide
  modified_base 46: mod_base = OTHER; note = 2' O-methyl nucleotide
  modified_base 48: mod_base = OTHER; note = 2' O-methyl nucleotide
  modified_base 50: mod_base = OTHER; note = 2' O-methyl nucleotide
  modified_base 52..57: mod_base = OTHER; note = 2' O-methyl nucleotide
  modified_base 60: mod_base = OTHER; note = 2' O-methyl nucleotide
  modified_base 61: mod_base = OTHER; note = 2' O-methyl nucleotide
  modified_base 66: mod_base = OTHER; note = 2' O-methyl nucleotide
  modified_base 67: mod_base = OTHER; note = 2' O-methyl nucleotide
  modified_base 70: mod_base = OTHER; note = 2' O-methyl nucleotide and phosphorothioate linkage
  modified_base 71: mod_base = OTHER; note = 2' O-methyl nucleotide and phosphorothioate linkage
  modified_base 72: mod_base = OTHER; note = 2' O-methyl nucleotide and phosphorothioate linkage
  modified_base 73: mod_base = OTHER; note = 2' O-methyl nucleotide and phosphorothioate linkage
  modified_base 74: mod_base = OTHER; note = 2' O-methyl nucleotide and phosphorothioate linkage
  modified_base 75: mod_base = OTHER; note = 2' O-methyl nucleotide and phosphorothioate linkage
  modified_base 76: mod_base = OTHER; note = 2' O-methyl nucleotide and phosphorothioate linkage
  modified_base 77: mod_base = OTHER; note = 2' O-methyl nucleotide and phosphorothioate linkage
  modified_base 78: mod_base = OTHER; note = 2' O-methyl nucleotide and phosphorothioate linkage
  modified_base 79: mod_base = OTHER; note = 2' O-methyl nucleotide
  modified_base 80: mod_base = OTHER; note = 2' O-methyl nucleotide
  modified_base 81: mod_base = OTHER; note = 2' O-methyl nucleotide
  modified_base 82: mod_base = OTHER; note = 2' O-methyl nucleotide and phosphorothioate linkage
  modified_base 83: mod_base = OTHER; note = 2' O-methyl nucleotide
  modified_base 84: mod_base = OTHER; note = 2' O-methyl nucleotide and phosphorothioate linkage
  modified_base 85: mod_base = OTHER; note = 2' O-methyl nucleotide and phosphorothioate linkage
  modified_base 86: mod_base = OTHER; note = 2' O-methyl nucleotide and phosphorothioate linkage
  modified_base 87: mod_base = OTHER; note = 2' O-methyl nucleotide and phosphorothioate linkage
  modified_base 88: mod_base = OTHER; note = 2' O-methyl nucleotide and phosphorothioate linkage
  modified_base 89: mod_base = OTHER; note = 2' O-methyl nucleotide and phosphorothioate linkage
  modified_base 90: mod_base = OTHER; note = 2' O-methyl nucleotide and phosphorothioate linkage
  modified_base 91: mod_base = OTHER; note = 2' O-methyl nucleotide
  modified_base 92: mod_base = OTHER; note = 2' O-methyl nucleotide and phosphorothioate linkage
  modified_base 93: mod_base = OTHER; note = 2' O-methyl nucleotide and phosphorothioate linkage
  modified_base 94: mod_base = OTHER; note = 2' O-methyl nucleotide and phosphorothioate linkage
  modified_base 95: mod_base = OTHER; note = 2' O-methyl nucleotide and phosphorothioate linkage
  modified_base 96: mod_base = OTHER; note = 2' O-methyl nucleotide and phosphorothioate linkage
  modified_base 97: mod_base = OTHER; note = 2' O-methyl nucleotide and phosphorothioate linkage
  modified_base 98: mod_base = OTHER; note = 2' O-methyl nucleotide and phosphorothioate linkage
  modified_base 99: mod_base = OTHER; note = 2' O-methyl nucleotide and phosphorothioate linkage
  modified_base 100: mod_base = OTHER; note = 2' O-methyl nucleotide and phosphorothioate linkage
  modified_base 101: mod_base = OTHER; note = 2' O-methyl nucleotide
  source 1..101: mol_type = other RNA

SEQ ID NO: 1365 - DNA, 20 bp, Homo sapiens
  source 1..20: mol_type = genomic DNA
acagatgacagaaggaagtg

SEQ ID NO: 1366 - DNA, 20 bp, Homo sapiens
  source 1..20: mol_type = genomic DNA
ttccttctgtcatctgtttg

SEQ ID NO: 1367 - DNA, 20 bp, Homo sapiens
  source 1..20: mol_type = genomic DNA
tctgtcatctgtttgtggat

SEQ ID NO: 1368 - DNA, 20 bp, Homo sapiens
  source 1..20: mol_type = genomic DNA
atccacaaacagatgacaga

SEQ ID NO: 1369 - DNA, 20 bp, Homo sapiens
  source 1..20: mol_type = genomic DNA
gtttgtggattggactcccc

SEQ ID NO: 1370 - DNA, 20 bp, Homo sapiens
  source 1..20: mol_type = genomic DNA
ggattggactccccaggaga

SEQ ID NO: 1371 - DNA, 20 bp, Homo sapiens
  source 1..20: mol_type = genomic DNA
gggaagactcccagaactcc

SEQ ID NO: 1372 - DNA, 20 bp, Homo sapiens
  source 1..20: mol_type = genomic DNA
gtgtatgaatggatgagcag

SEQ ID NO: 1373 - DNA, 20 bp, Homo sapiens
  source 1..20: mol_type = genomic DNA
agtgtatgaatggatgagca

SEQ ID NO: 1374 - DNA, 20 bp, Homo sapiens
  source 1..20: mol_type = genomic DNA
atatttgtcgagtgtatgaa

SEQ ID NO: 1375 - DNA, 20 bp, Homo sapiens
  source 1..20: mol_type = genomic DNA
cacaagcctacggcagagca

SEQ ID NO: 1376 - DNA, 20 bp, Homo sapiens
  source 1..20: mol_type = genomic DNA
gtaggcttgtgggacactac

SEQ ID NO: 1377 - DNA, 20 bp, Homo sapiens
  source 1..20: mol_type = genomic DNA
taggcttgtgggacactaca

SEQ ID NO: 1378 - DNA, 20 bp, Homo sapiens
  source 1..20: mol_type = genomic DNA
tgtagtgtcccacaagccta

SEQ ID NO: 1379 - DNA, 20 bp, Homo sapiens
  source 1..20: mol_type = genomic DNA
aggcttgtgggacactacag

SEQ ID NO: 1380 - DNA, 20 bp, Homo sapiens
  source 1..20: mol_type = genomic DNA
aaagaaatgaagtcttgata

SEQ ID NO: 1381 - DNA, 20 bp, Homo sapiens
  source 1..20: mol_type = genomic DNA
gaaatgaagtcttgatacgg

SEQ ID NO: 1382 - DNA, 20 bp, Homo sapiens
  source 1..20: mol_type = genomic DNA
aatctccctgtctgtcctta

SEQ ID NO: 1383 - DNA, 20 bp, Homo sapiens
  source 1..20: mol_type = genomic DNA
tcaggtccttaaggacagac

SEQ ID NO: 1384 - DNA, 20 bp, Homo sapiens
  source 1..20: mol_type = genomic DNA
aaaatgatgtcaggtcctta

SEQ ID NO: 1385 - DNA, 20 bp, Homo sapiens
  source 1..20: mol_type = genomic DNA
cctcaagtcgtctaccgcct

SEQ ID NO: 1386 - DNA, 20 bp, Homo sapiens
  source 1..20: mol_type = genomic DNA
ccgaggcggtagacgacttg

SEQ ID NO: 1387 - DNA, 20 bp, Homo sapiens
  source 1..20: mol_type = genomic DNA
ttctctaatgaagtaacatt

SEQ ID NO: 1388 - DNA, 20 bp, Homo sapiens
  source 1..20: mol_type = genomic DNA
cagaaaagcaactggcagga

SEQ ID NO: 1389 - DNA, 20 bp, Homo sapiens
  source 1..20: mol_type = genomic DNA
gggacagaaaagcaactggc

SEQ ID NO: 1390 - DNA, 20 bp, Homo sapiens
  source 1..20: mol_type = genomic DNA
tatggggacagaaaagcaac

SEQ ID NO: 1391 - DNA, 20 bp, Homo sapiens
  source 1..20: mol_type = genomic DNA
ttttgtatctattctaaaaa

SEQ ID NO: 1392 - DNA, 20 bp, Homo sapiens
  source 1..20: mol_type = genomic DNA
tgtatctattctaaaaatgg

SEQ ID NO: 1393 - RNA, 20 nt, synthetic construct
  misc_feature 1..20: note = Synthetic
  source 1..20: mol_type = other RNA
acagatgacagaaggaagtg

SEQ ID NO: 1394 - RNA, 20 nt, synthetic construct
  misc_feature 1..20: note = Synthetic
  source 1..20: mol_type = other RNA
ttccttctgtcatctgtttg

SEQ ID NO: 1395 - RNA, 20 nt, synthetic construct
  misc_feature 1..20: note = Synthetic
  source 1..20: mol_type = other RNA
tctgtcatctgtttgtggat

SEQ ID NO: 1396 - RNA, 20 nt, synthetic construct
  misc_feature 1..20: note = Synthetic
  source 1..20: mol_type = other RNA
atccacaaacagatgacaga

SEQ ID NO: 1397 - RNA, 20 nt, synthetic construct
  misc_feature 1..20: note = Synthetic
  source 1..20: mol_type = other RNA
gtttgtggattggactcccc

SEQ ID NO: 1398 - RNA, 20 nt, synthetic construct
  misc_feature 1..20: note = Synthetic
  source 1..20: mol_type = other RNA
ggattggactccccaggaga

SEQ ID NO: 1399 - RNA, 20 nt, synthetic construct
  misc_feature 1..20: note = Synthetic
  source 1..20: mol_type = other RNA
gggaagactcccagaactcc

SEQ ID NO: 1400 - RNA, 20 nt, synthetic construct
  misc_feature 1..20: note = Synthetic
  source 1..20: mol_type = other RNA
gtgtatgaatggatgagcag

SEQ ID NO: 1401 - RNA, 20 nt, synthetic construct
  misc_feature 1..20: note = Synthetic
  source 1..20: mol_type = other RNA
agtgtatgaatggatgagca

SEQ ID NO: 1402 - RNA, 20 nt, synthetic construct
  misc_feature 1..20: note = Synthetic
  source 1..20: mol_type = other RNA
atatttgtcgagtgtatgaa

SEQ ID NO: 1403 - RNA, 20 nt, synthetic construct
  misc_feature 1..20: note = Synthetic
  source 1..20: mol_type = other RNA
cacaagcctacggcagagca

SEQ ID NO: 1404 - RNA, 20 nt, synthetic construct
  misc_feature 1..20: note = Synthetic
  source 1..20: mol_type = other RNA
gtaggcttgtgggacactac

SEQ ID NO: 1405 - RNA, 20 nt, synthetic construct
  misc_feature 1..20: note = Synthetic
  source 1..20: mol_type = other RNA
taggcttgtgggacactaca

SEQ ID NO: 1406 - RNA, 20 nt, synthetic construct
  misc_feature 1..20: note = Synthetic
  source 1..20: mol_type = other RNA
tgtagtgtcccacaagccta

SEQ ID NO: 1407 - RNA, 20 nt, synthetic construct
  misc_feature 1..20: note = Synthetic
  source 1..20: mol_type = other RNA
aggcttgtgggacactacag

SEQ ID NO: 1408 - RNA, 20 nt, synthetic construct
  misc_feature 1..20: note = Synthetic
  source 1..20: mol_type = other RNA
aaagaaatgaagtcttgata

SEQ ID NO: 1409 - RNA, 20 nt, synthetic construct
  misc_feature 1..20: note = Synthetic
  source 1..20: mol_type = other RNA
gaaatgaagtcttgatacgg

SEQ ID NO: 1410 - RNA, 20 nt, synthetic construct
  misc_feature 1..20: note = Synthetic
  source 1..20: mol_type = other RNA
aatctccctgtctgtcctta

SEQ ID NO: 1411 - RNA, 20 nt, synthetic construct
  misc_feature 1..20: note = Synthetic
  source 1..20: mol_type = other RNA
tcaggtccttaaggacagac

SEQ ID NO: 1412 - RNA, 20 nt, synthetic construct
  misc_feature 1..20: note = Synthetic
  source 1..20: mol_type = other RNA
aaaatgatgtcaggtcctta

SEQ ID NO: 1413 - RNA, 20 nt, synthetic construct
  misc_feature 1..20: note = Synthetic
  source 1..20: mol_type = other RNA
cctcaagtcgtctaccgcct

SEQ ID NO: 1414 - RNA, 20 nt, synthetic construct
  misc_feature 1..20: note = Synthetic
  source 1..20: mol_type = other RNA
ccgaggcggtagacgacttg

SEQ ID NO: 1415 - RNA, 20 nt, synthetic construct
  misc_feature 1..20: note = Synthetic
  source 1..20: mol_type = other RNA
ttctctaatgaagtaacatt

SEQ ID NO: 1416 - RNA, 20 nt, synthetic construct
  misc_feature 1..20: note = Synthetic
  source 1..20: mol_type = other RNA
cagaaaagcaactggcagga

SEQ ID NO: 1417 - RNA, 20 nt, synthetic construct
  misc_feature 1..20: note = Synthetic
  source 1..20: mol_type = other RNA
gggacagaaaagcaactggc

SEQ ID NO: 1418 - RNA, 20 nt, synthetic construct
  misc_feature 1..20: note = Synthetic
  source 1..20: mol_type = other RNA
tatggggacagaaaagcaac

SEQ ID NO: 1419 - RNA, 20 nt, synthetic construct
  misc_feature 1..20: note = Synthetic
  source 1..20: mol_type = other RNA
ttttgtatctattctaaaaa

SEQ ID NO: 1420 - RNA, 20 nt, synthetic construct
  misc_feature 1..20: note = Synthetic
  source 1..20: mol_type = other RNA
tgtatctattctaaaaatgg

SEQ ID NO: 1421 - RNA, 100 nt, synthetic construct
  misc_feature 1..100: note = Synthetic
  source 1..100: mol_type = other RNA
acagatgacagaaggaagtggttttagagctagaaatagcaagttaaaataaggctagtccgttatcaacttgaaaaagtggcaccgagtcggtgctttt

SEQ ID NO: 1422 - RNA, 100 nt, synthetic construct
  misc_feature 1..100: note = Synthetic
  source 1..100: mol_type = other RNA
ttccttctgtcatctgtttggttttagagctagaaatagcaagttaaaataaggctagtccgttatcaacttgaaaaagtggcaccgagtcggtgctttt

SEQ ID NO: 1423 - RNA, 100 nt, synthetic construct
  misc_feature 1..100: note = Synthetic
  source 1..100: mol_type = other RNA
tctgtcatctgtttgtggatgttttagagctagaaatagcaagttaaaataaggctagtccgttatcaacttgaaaaagtggcaccgagtcggtgctttt

SEQ ID NO: 1424 - RNA, 100 nt, synthetic construct
  misc_feature 1..100: note = Synthetic
  source 1..100: mol_type = other RNA
atccacaaacagatgacagagttttagagctagaaatagcaagttaaaataaggctagtccgttatcaacttgaaaaagtggcaccgagtcggtgctttt

SEQ ID NO: 1425 - RNA, 100 nt, synthetic construct
  misc_feature 1..100: note = Synthetic
  source 1..100: mol_type = other RNA
gtttgtggattggactccccgttttagagctagaaatagcaagttaaaataaggctagtccgttatcaacttgaaaaagtggcaccgagtcggtgctttt

SEQ ID NO: 1426 - RNA, 100 nt, synthetic construct
  misc_feature 1..100: note = Synthetic
  source 1..100: mol_type = other RNA
ggattggactccccaggagagttttagagctagaaatagcaagttaaaataaggctagtccgttatcaacttgaaaaagtggcaccgagtcggtgctttt

SEQ ID NO: 1427 - RNA, 100 nt, synthetic construct
  misc_feature 1..100: note = Synthetic
  source 1..100: mol_type = other RNA
gggaagactcccagaactccgttttagagctagaaatagcaagttaaaataaggctagtccgttatcaacttgaaaaagtggcaccgagtcggtgctttt

SEQ ID NO: 1428 - RNA, 100 nt, synthetic construct
  misc_feature 1..100: note = Synthetic
  source 1..100: mol_type = other RNA
gtgtatgaatggatgagcaggttttagagctagaaatagcaagttaaaataaggctagtccgttatcaacttgaaaaagtggcaccgagtcggtgctttt

SEQ ID NO: 1429 - RNA, 100 nt, synthetic construct
  misc_feature 1..100: note = Synthetic
  source 1..100: mol_type = other RNA
agtgtatgaatggatgagcagttttagagctagaaatagcaagttaaaataaggctagtccgttatcaacttgaaaaagtggcaccgagtcggtgctttt

SEQ ID NO: 1430 - RNA, 100 nt, synthetic construct
  misc_feature 1..100: note = Synthetic
  source 1..100: mol_type = other RNA
atatttgtcgagtgtatgaagttttagagctagaaatagcaagttaaaataaggctagtccgttatcaacttgaaaaagtggcaccgagtcggtgctttt

SEQ ID NO: 1431 - RNA, 100 nt, synthetic construct
  misc_feature 1..100: note = Synthetic
  source 1..100: mol_type = other RNA
cacaagcctacggcagagcagttttagagctagaaatagcaagttaaaataaggctagtccgttatcaacttgaaaaagtggcaccgagtcggtgctttt

SEQ ID NO: 1432 - RNA, 100 nt, synthetic construct
  misc_feature 1..100: note = Synthetic
  source 1..100: mol_type = other RNA
gtaggcttgtgggacactacgttttagagctagaaatagcaagttaaaataaggctagtccgttatcaacttgaaaaagtggcaccgagtcggtgctttt

SEQ ID NO: 1433 - RNA, 100 nt, synthetic construct
  misc_feature 1..100: note = Synthetic
  source 1..100: mol_type = other RNA
taggcttgtgggacactacagttttagagctagaaatagcaagttaaaataaggctagtccgttatcaacttgaaaaagtggcaccgagtcggtgctttt

SEQ ID NO: 1434 - RNA, 100 nt, synthetic construct
  misc_feature 1..100: note = Synthetic
  source 1..100: mol_type = other RNA
tgtagtgtcccacaagcctagttttagagctagaaatagcaagttaaaataaggctagtccgttatcaacttgaaaaagtggcaccgagtcggtgctttt

SEQ ID NO: 1435 - RNA, 100 nt, synthetic construct
  misc_feature 1..100: note = Synthetic
  source 1..100: mol_type = other RNA
aggcttgtgggacactacaggttttagagctagaaatagcaagttaaaataaggctagtccgttatcaacttgaaaaagtggcaccgagtcggtgctttt

SEQ ID NO: 1436 - RNA, 100 nt, synthetic construct
  misc_feature 1..100: note = Synthetic
  source 1..100: mol_type = other RNA
aaagaaatgaagtcttgatagttttagagctagaaatagcaagttaaaataaggctagtccgttatcaacttgaaaaagtggcaccgagtcggtgctttt

SEQ ID NO: 1437 - RNA, 100 nt, synthetic construct
  misc_feature 1..100: note = Synthetic
  source 1..100: mol_type = other RNA
gaaatgaagtcttgatacgggttttagagctagaaatagcaagttaaaataaggctagtccgttatcaacttgaaaaagtggcaccgagtcggtgctttt

SEQ ID NO: 1438 - RNA, 100 nt, synthetic construct
  misc_feature 1..100: note = Synthetic
  source 1..100: mol_type = other RNA
aatctccctgtctgtccttagttttagagctagaaatagcaagttaaaataaggctagtccgttatcaacttgaaaaagtggcaccgagtcggtgctttt

SEQ ID NO: 1439 - RNA, 100 nt, synthetic construct
  misc_feature 1..100: note = Synthetic
  source 1..100: mol_type = other RNA
tcaggtccttaaggacagacgttttagagctagaaatagcaagttaaaataaggctagtccgttatcaacttgaaaaagtggcaccgagtcggtgctttt

SEQ ID NO: 1440 - RNA, 100 nt, synthetic construct
  misc_feature 1..100: note = Synthetic
  source 1..100: mol_type = other RNA
aaaatgatgtcaggtccttagttttagagctagaaatagcaagttaaaataaggctagtccgttatcaacttgaaaaagtggcaccgagtcggtgctttt

SEQ ID NO: 1441 - RNA, 100 nt, synthetic construct
  misc_feature 1..100: note = Synthetic
  source 1..100: mol_type = other RNA
cctcaagtcgtctaccgcctgttttagagctagaaatagcaagttaaaataaggctagtccgttatcaacttgaaaaagtggcaccgagtcggtgctttt

SEQ ID NO: 1442 - RNA, 100 nt, synthetic construct
  misc_feature 1..100: note = Synthetic
  source 1..100: mol_type = other RNA
ccgaggcggtagacgacttggttttagagctagaaatagcaagttaaaataaggctagtccgttatcaacttgaaaaagtggcaccgagtcggtgctttt

SEQ ID NO: 1443 - RNA, 100 nt, synthetic construct
  misc_feature 1..100: note = Synthetic
  source 1..100: mol_type = other RNA
ttctctaatgaagtaacattgttttagagctagaaatagcaagttaaaataaggctagtccgttatcaacttgaaaaagtggcaccgagtcggtgctttt

SEQ ID NO: 1444 - RNA, 100 nt, synthetic construct
  misc_feature 1..100: note = Synthetic
  source 1..100: mol_type = other RNA
cagaaaagcaactggcaggagttttagagctagaaatagcaagttaaaataaggctagtccgttatcaacttgaaaaagtggcaccgagtcggtgctttt

SEQ ID NO: 1445 - RNA, 100 nt, synthetic construct
  misc_feature 1..100: note = Synthetic
  source 1..100: mol_type = other RNA
gggacagaaaagcaactggcgttttagagctagaaatagcaagttaaaataaggctagtccgttatcaacttgaaaaagtggcaccgagtcggtgctttt

SEQ ID NO: 1446 - RNA, 100 nt, synthetic construct
  misc_feature 1..100: note = Synthetic
  source 1..100: mol_type = other RNA
tatggggacagaaaagcaacgttttagagctagaaatagcaagttaaaataaggctagtccgttatcaacttgaaaaagtggcaccgagtcggtgctttt

SEQ ID NO: 1447 - RNA, 100 nt, synthetic construct
  misc_feature 1..100: note = Synthetic
  source 1..100: mol_type = other RNA
ttttgtatctattctaaaaagttttagagctagaaatagcaagttaaaataaggctagtccgttatcaacttgaaaaagtggcaccgagtcggtgctttt

SEQ ID NO: 1448 - RNA, 100 nt, synthetic construct
  misc_feature 1..100: note = Synthetic
  source 1..100: mol_type = other RNA
tgtatctattctaaaaatgggttttagagctagaaatagcaagttaaaataaggctagtccgttatcaacttgaaaaagtggcaccgagtcggtgctttt

SEQ ID NO: 1449 - RNA, 100 nt, synthetic construct; identical to SEQ ID NO: 1127
  misc_feature 1..100: note = Synthetic
  modified_base 1: mod_base = OTHER; note = 2' O-methyl nucleotide and phosphorothioate linkage
  modified_base 2: mod_base = OTHER; note = 2' O-methyl nucleotide and phosphorothioate linkage
  modified_base 3: mod_base = OTHER; note = 2' O-methyl nucleotide and phosphorothioate linkage
  modified_base 29: mod_base = OTHER; note = 2' O-methyl nucleotide
  modified_base 30: mod_base = OTHER; note = 2' O-methyl nucleotide
  modified_base 31: mod_base = OTHER; note = 2' O-methyl nucleotide
  modified_base 32: mod_base = OTHER; note = 2' O-methyl nucleotide
  modified_base 33: mod_base = OTHER; note = 2' O-methyl nucleotide
  modified_base 34: mod_base = OTHER; note = 2' O-methyl nucleotide
  modified_base 35: mod_base = OTHER; note = 2' O-methyl nucleotide
  modified_base 36: mod_base = OTHER; note = 2' O-methyl nucleotide
  modified_base 37: mod_base = OTHER; note = 2' O-methyl nucleotide
  modified_base 38: mod_base = OTHER; note = 2' O-methyl nucleotide
  modified_base 39: mod_base = OTHER; note = 2' O-methyl nucleotide
  modified_base 40: mod_base = OTHER; note = 2' O-methyl nucleotide
  modified_base 69: mod_base = OTHER; note = 2' O-methyl nucleotide
  modified_base 70: mod_base = OTHER; note = 2' O-methyl nucleotide
  modified_base 71: mod_base = OTHER; note = 2' O-methyl nucleotide
  modified_base 72: mod_base = OTHER; note = 2' O-methyl nucleotide
  modified_base 73: mod_base = OTHER; note = 2' O-methyl nucleotide
  modified_base 74: mod_base = OTHER; note = 2' O-methyl nucleotide
  modified_base 75: mod_base = OTHER; note = 2' O-methyl nucleotide
  modified_base 76: mod_base = OTHER; note = 2' O-methyl nucleotide
  modified_base 77: mod_base = OTHER; note = 2' O-methyl nucleotide
  modified_base 78: mod_base = OTHER; note = 2' O-methyl nucleotide
  modified_base 79: mod_base = OTHER; note = 2' O-methyl nucleotide
  modified_base 80: mod_base = OTHER; note = 2' O-methyl nucleotide
  modified_base 81: mod_base = OTHER; note = 2' O-methyl nucleotide
  modified_base 82: mod_base = OTHER; note = 2' O-methyl nucleotide
  modified_base 83: mod_base = OTHER; note = 2' O-methyl nucleotide
  modified_base 84: mod_base = OTHER; note = 2' O-methyl nucleotide
  modified_base 85: mod_base = OTHER; note = 2' O-methyl nucleotide
  modified_base 86: mod_base = OTHER; note = 2' O-methyl nucleotide
  modified_base 87: mod_base = OTHER; note = 2' O-methyl nucleotide
  modified_base 88: mod_base = OTHER; note = 2' O-methyl nucleotide
  modified_base 89: mod_base = OTHER; note = 2' O-methyl nucleotide
  modified_base 90: mod_base = OTHER; note = 2' O-methyl nucleotide
  modified_base 91: mod_base = OTHER; note = 2' O-methyl nucleotide
  modified_base 92: mod_base = OTHER; note = 2' O-methyl nucleotide
  modified_base 93: mod_base = OTHER; note = 2' O-methyl nucleotide
  modified_base 94: mod_base = OTHER; note = 2' O-methyl nucleotide
  modified_base 95: mod_base = OTHER; note = 2' O-methyl nucleotide
  modified_base 96: mod_base = OTHER; note = 2' O-methyl nucleotide
  modified_base 97: mod_base = OTHER; note = 2' O-methyl nucleotide and phosphorothioate linkage
  modified_base 98: mod_base = OTHER; note = 2' O-methyl nucleotide and phosphorothioate linkage
  modified_base 99: mod_base = OTHER; note = 2' O-methyl nucleotide and phosphorothioate linkage
  modified_base 100: mod_base = OTHER; note = 2' O-methyl nucleotide
  source 1..100: mol_type = other RNA

SEQ ID NO: 1450 - RNA, 100 nt, synthetic construct; identical to SEQ ID NO: 1139
  misc_feature 1..100: note = Synthetic
  modified_base 1: mod_base = OTHER; note = 2' O-methyl nucleotide and phosphorothioate linkage
  modified_base 2: mod_base = OTHER; note = 2' O-methyl nucleotide and phosphorothioate linkage
  modified_base 3: mod_base = OTHER; note = 2' O-methyl nucleotide and phosphorothioate linkage
  modified_base 29: mod_base = OTHER; note = 2' O-methyl nucleotide
  modified_base 30: mod_base = OTHER; note = 2' O-methyl nucleotide
  modified_base 31: mod_base = OTHER; note = 2' O-methyl nucleotide
  modified_base 32: mod_base = OTHER; note = 2' O-methyl nucleotide
  modified_base 33: mod_base = OTHER; note = 2' O-methyl nucleotide
  modified_base 34: mod_base = OTHER; note = 2' O-methyl nucleotide
  modified_base 35: mod_base = OTHER; note = 2' O-methyl nucleotide
  modified_base 36: mod_base = OTHER; note = 2' O-methyl nucleotide
  modified_base 37: mod_base = OTHER; note = 2' O-methyl nucleotide
  modified_base 38: mod_base = OTHER; note = 2' O-methyl nucleotide
  modified_base 39: mod_base = OTHER; note = 2' O-methyl nucleotide
  modified_base 40: mod_base = OTHER; note = 2' O-methyl nucleotide
  modified_base 69: mod_base = OTHER; note = 2' O-methyl nucleotide
  modified_base 70: mod_base = OTHER; note = 2' O-methyl nucleotide
  modified_base 71: mod_base = OTHER; note = 2' O-methyl nucleotide
  modified_base 72: mod_base = OTHER; note = 2' O-methyl nucleotide
  modified_base 73: mod_base = OTHER; note = 2' O-methyl nucleotide
  modified_base 74: mod_base = OTHER; note = 2' O-methyl nucleotide
  modified_base 75: mod_base = OTHER; note = 2' O-methyl nucleotide
  modified_base 76: mod_base = OTHER; note = 2' O-methyl nucleotide
  modified_base 77: mod_base = OTHER; note = 2' O-methyl nucleotide
  modified_base 78: mod_base = OTHER; note = 2' O-methyl nucleotide
  modified_base 79: mod_base = OTHER; note = 2' O-methyl nucleotide
  modified_base 80: mod_base = OTHER; note = 2' O-methyl nucleotide
  modified_base 81: mod_base = OTHER; note = 2' O-methyl nucleotide
  modified_base 82: mod_base = OTHER; note = 2' O-methyl nucleotide
  modified_base 83: mod_base = OTHER; note = 2' O-methyl nucleotide
  modified_base 84: mod_base = OTHER; note = 2' O-methyl nucleotide
  modified_base 85: mod_base = OTHER; note = 2' O-methyl nucleotide
  modified_base 86: mod_base = OTHER; note = 2' O-methyl nucleotide
  modified_base 87: mod_base = OTHER; note = 2' O-methyl nucleotide
  modified_base 88: mod_base = OTHER; note = 2' O-methyl nucleotide
  modified_base 89: mod_base = OTHER; note = 2' O-methyl nucleotide
  modified_base 90: mod_base = OTHER; note = 2' O-methyl nucleotide
  modified_base 91: mod_base = OTHER; note = 2' O-methyl nucleotide
  modified_base 92: mod_base = OTHER; note = 2' O-methyl nucleotide
  modified_base 93: mod_base = OTHER; note = 2' O-methyl nucleotide
  modified_base 94: mod_base = OTHER; note = 2' O-methyl nucleotide
  modified_base 95: mod_base = OTHER; note = 2' O-methyl nucleotide
  modified_base 96: mod_base = OTHER; note = 2' O-methyl nucleotide
  modified_base 97: mod_base = OTHER; note = 2' O-methyl nucleotide and phosphorothioate linkage
  modified_base 98: mod_base = OTHER; note = 2' O-methyl nucleotide and phosphorothioate linkage
  modified_base 99: mod_base = OTHER; note = 2' O-methyl nucleotide and phosphorothioate linkage
  modified_base 100: mod_base = OTHER; note = 2' O-methyl nucleotide
  source 1..100: mol_type = other RNA

SEQ ID NO: 1451 - RNA, 20 nt, synthetic construct
  misc_feature 1..20: note = Synthetic
  modified_base 1: mod_base = OTHER; note = 2' O-methyl nucleotide and phosphorothioate linkage
  modified_base 2: mod_base = OTHER; note = 2' O-methyl nucleotide and phosphorothioate linkage
  modified_base 3: mod_base = OTHER; note = 2' O-methyl nucleotide and phosphorothioate linkage
  source 1..20: mol_type = other RNA
agctctggcaggcaatgctt

SEQ ID NO: 1452 - RNA, 20 nt, synthetic construct
  misc_feature 1..20: note = Synthetic
  modified_base 1: mod_base = OTHER; note = 2' O-methyl nucleotide and phosphorothioate linkage
  modified_base 2: mod_base = OTHER; note = 2' O-methyl nucleotide and phosphorothioate linkage
  modified_base 3: mod_base = OTHER; note = 2' O-methyl nucleotide and phosphorothioate linkage
  source 1..20: mol_type = other RNA
atataaaacaaagctctggc

SEQ ID NO: 1453 - RNA, 20 nt, synthetic construct
  misc_feature 1..20: note = Synthetic
  modified_base 1: mod_base = OTHER; note = 2' O-methyl nucleotide and phosphorothioate linkage
  modified_base 2: mod_base = OTHER; note = 2' O-methyl nucleotide and phosphorothioate linkage
  modified_base 3: mod_base = OTHER; note = 2' O-methyl nucleotide and phosphorothioate linkage
  source 1..20: mol_type = other RNA
aaatatataaaacaaagctc

SEQ ID NO: 1454 - RNA, 20 nt, synthetic construct
  misc_feature 1..20: note = Synthetic
  modified_base 1: mod_base = OTHER; note = 2' O-methyl nucleotide and phosphorothioate linkage
  modified_base 2: mod_base = OTHER; note = 2' O-methyl nucleotide and phosphorothioate linkage
  modified_base 3: mod_base = OTHER; note = 2' O-methyl nucleotide and phosphorothioate linkage
  source 1..20: mol_type = other RNA
acgtggcgtgaacatctgcc

SEQ ID NO: 1455 - RNA, 20 nt, synthetic construct
  misc_feature 1..20: note = Synthetic
  modified_base 1: mod_base = OTHER; note = 2' O-methyl nucleotide and phosphorothioate linkage
  modified_base 2: mod_base = OTHER; note = 2' O-methyl nucleotide and phosphorothioate linkage
  modified_base 3: mod_base = OTHER; note = 2' O-methyl nucleotide and phosphorothioate linkage
  source 1..20: mol_type = other RNA
cagtgcccatgcaatggctt

SEQ ID NO: 1456 - RNA, 20 nt, synthetic construct
  misc_feature 1..20: note = Synthetic
  modified_base 1: mod_base = OTHER; note = 2' O-methyl nucleotide and phosphorothioate linkage
  modified_base 2: mod_base = OTHER; note = 2' O-methyl nucleotide and phosphorothioate linkage
  modified_base 3: mod_base = OTHER; note = 2' O-methyl nucleotide and phosphorothioate linkage
  source 1..20: mol_type = other RNA
atgagtggcttctgggagat

SEQ ID NO: 1457 - DNA, 65 bp, synthetic construct
  misc_feature 1..65: note = Synthetic
  modified_base 1: mod_base = OTHER; note = 3'-3' phosphodiester bond to a thymidine
  modified_base 26..65: mod_base = OTHER; note = ribonucleotide
  modified_base 26: mod_base = OTHER; note = uracil
  modified_base 26: mod_base = OTHER; note = 2' O-fluoro nucleotide
  modified_base 29..32: mod_base = OTHER; note = uracil
  modified_base 30: mod_base = OTHER; note = 2' O-fluoro nucleotide
  modified_base 31: mod_base = OTHER; note = 2' O-fluoro nucleotide
  modified_base 33: mod_base = OTHER; note = 2' O-fluoro nucleotide
  modified_base 34: mod_base = OTHER; note = 2' O-fluoro nucleotide
  modified_base 35: mod_base = OTHER; note = uracil
  modified_base 36: mod_base = OTHER; note = 2' O-fluoro nucleotide
  modified_base 37..38: mod_base = OTHER; note = uracil
  modified_base 37: mod_base = OTHER; note = 2' O-fluoro nucleotide
  modified_base 38: mod_base = OTHER; note = 2' O-fluoro nucleotide
  modified_base 40: mod_base = OTHER; note = uracil
  modified_base 40: mod_base = OTHER; note = 2' O-fluoro nucleotide
  modified_base 41: mod_base = OTHER; note = 2' O-fluoro nucleotide
  modified_base 42: mod_base = OTHER; note = 2' O-fluoro nucleotide
  modified_base 43: mod_base = OTHER; note = 2' O-fluoro nucleotide
  modified_base 44..45: mod_base = OTHER; note = uracil
  modified_base 47..48: mod_base = OTHER; note = uracil
  modified_base 50: mod_base = OTHER; note = uracil
  modified_base 53..54: mod_base = OTHER; note = uracil
  modified_base 65: mod_base = OTHER; note = 3'-3' phosphodiester bond to a thymidine
  source 1..65: mol_type = other DNA
atgtgtttttgtcaaaagacctttttaattttactcttgtagattcttatccttcacgaggaaag

SEQ ID NO: 1458 - DNA, 66 bp, synthetic construct
  misc_feature 1..66: note = Synthetic
  modified_base 1: mod_base = OTHER; note = 3'-3' phosphodiester bond to a thymidine
  modified_base 26: mod_base = OTHER; note = uracil
  modified_base 26..66: mod_base = OTHER; note = ribonucleotide
  modified_base 26: mod_base = OTHER; note = 2' O-fluoro nucleotide
  modified_base 29..31: mod_base = OTHER; note = uracil
  modified_base 30: mod_base = OTHER; note = 2' O-fluoro nucleotide
  modified_base 31: mod_base = OTHER; note = 2' O-fluoro nucleotide
  modified_base 33: mod_base = OTHER; note = uracil
  modified_base 34: mod_base = OTHER; note = 2' O-fluoro nucleotide
  modified_base 35: mod_base = OTHER; note = 2' O-fluoro nucleotide
  modified_base 36: mod_base = OTHER; note = uracil
  modified_base 37: mod_base = OTHER; note = 2' O-fluoro nucleotide
  modified_base 38..39: mod_base = OTHER; note = uracil
  modified_base 38: mod_base = OTHER; note = 2' O-fluoro nucleotide
  modified_base 39: mod_base = OTHER; note = 2' O-fluoro nucleotide
  modified_base 41: mod_base = OTHER; note = uracil
  modified_base 41: mod_base = OTHER; note = 2' O-fluoro nucleotide
  modified_base 42: mod_base = OTHER; note = 2' O-fluoro nucleotide
  modified_base 43: mod_base = OTHER; note = 2' O-fluoro nucleotide
  modified_base 45: mod_base = OTHER; note = uracil
  modified_base 52: mod_base = OTHER; note = uracil
  modified_base 55: mod_base = OTHER; note = uracil
  modified_base 57: mod_base = OTHER; note = uracil
  modified_base 63..64: mod_base = OTHER; note = uracil
  modified_base 66: mod_base = OTHER; note = uracil
  modified_base 66: mod_base = OTHER; note = 3'-3' phosphodiester bond to a thymidine
  source 1..66: mol_type = other DNA
atgtgtttttgtcaaaagacctttttaatttctactcttgtagatggagaatgatgtccccgttgt

SEQ ID NO: 1459 - RNA, 100 nt, synthetic construct; identical to SEQ ID NO: 918
  misc_feature 1..100: note = Synthetic
  modified_base 1: mod_base = OTHER; note = 2' O-methyl nucleotide and phosphorothioate linkage
  modified_base 2: mod_base = OTHER; note = 2' O-methyl nucleotide and phosphorothioate linkage
  modified_base 3: mod_base = OTHER; note = 2' O-methyl nucleotide and phosphorothioate linkage
  modified_base 29: mod_base = OTHER; note = 2' O-methyl nucleotide
  modified_base 30: mod_base = OTHER; note = 2' O-methyl nucleotide
  modified_base 31: mod_base = OTHER; note = 2' O-methyl nucleotide
  modified_base 32: mod_base = OTHER; note = 2' O-methyl nucleotide
  modified_base 33: mod_base = OTHER; note = 2' O-methyl nucleotide
  modified_base 34: mod_base = OTHER; note = 2' O-methyl nucleotide
  modified_base 35: mod_base = OTHER; note = 2' O-methyl nucleotide
  modified_base 36: mod_base = OTHER; note = 2' O-methyl nucleotide
  modified_base 37: mod_base = OTHER; note = 2' O-methyl nucleotide
  modified_base 38: mod_base = OTHER; note = 2' O-methyl nucleotide
  modified_base 39: mod_base = OTHER; note = 2' O-methyl nucleotide
  modified_base 40: mod_base = OTHER; note = 2' O-methyl nucleotide
  modified_base 69: mod_base = OTHER; note = 2' O-methyl nucleotide
  modified_base 70: mod_base = OTHER; note = 2' O-methyl nucleotide
  modified_base 71: mod_base = OTHER; note = 2' O-methyl nucleotide
  modified_base 72: mod_base = OTHER; note = 2' O-methyl nucleotide
  modified_base 73: mod_base = OTHER; note = 2' O-methyl nucleotide
  modified_base 74: mod_base = OTHER; note = 2' O-methyl nucleotide
  modified_base 75: mod_base = OTHER; note = 2' O-methyl nucleotide
  modified_base 76: mod_base = OTHER; note = 2' O-methyl nucleotide
  modified_base 77: mod_base = OTHER; note = 2' O-methyl nucleotide
  modified_base 78: mod_base = OTHER; note = 2' O-methyl nucleotide
  modified_base 79: mod_base = OTHER; note = 2' O-methyl nucleotide
  modified_base 80: mod_base = OTHER; note = 2' O-methyl nucleotide
  modified_base 81: mod_base = OTHER; note = 2' O-methyl nucleotide
  modified_base 82: mod_base = OTHER; note = 2' O-methyl nucleotide
  modified_base 83: mod_base = OTHER; note = 2' O-methyl nucleotide
  modified_base 84: mod_base = OTHER; note = 2' O-methyl nucleotide
  modified_base 85: mod_base = OTHER; note = 2' O-methyl nucleotide
  modified_base 86: mod_base = OTHER; note = 2' O-methyl nucleotide
  modified_base 87: mod_base = OTHER; note = 2' O-methyl nucleotide
  modified_base 88: mod_base = OTHER; note = 2' O-methyl nucleotide
  modified_base 89: mod_base = OTHER; note = 2' O-methyl nucleotide
  modified_base 90: mod_base = OTHER; note = 2' O-methyl nucleotide
  modified_base 91: mod_base = OTHER; note = 2' O-methyl nucleotide
  modified_base 92: mod_base = OTHER; note = 2' O-methyl nucleotide
  modified_base 93: mod_base = OTHER; note = 2' O-methyl nucleotide
  modified_base 94: mod_base = OTHER; note = 2' O-methyl nucleotide
  modified_base 95: mod_base = OTHER; note = 2' O-methyl nucleotide
  modified_base 96: mod_base = OTHER; note = 2' O-methyl nucleotide
  modified_base 97: mod_base = OTHER; note = 2' O-methyl nucleotide and phosphorothioate linkage
  modified_base 98: mod_base = OTHER; note = 2' O-methyl nucleotide and phosphorothioate linkage
  modified_base 99: mod_base = OTHER; note = 2' O-methyl nucleotide and phosphorothioate linkage
  modified_base 100: mod_base = OTHER; note = 2' O-methyl nucleotide
  source 1..100: mol_type = other RNA

SEQ ID NO: 1460 - RNA, 100 nt, synthetic construct; identical to SEQ ID NO: 918
  misc_feature 1..100: note = Synthetic
  modified_base 1: mod_base = OTHER; note = 2' O-methyl nucleotide and phosphorothioate linkage
  modified_base 2: mod_base = OTHER; note = 2' O-methyl nucleotide and phosphorothioate linkage
  modified_base 3: mod_base = OTHER; note = 2' O-methyl nucleotide and phosphorothioate linkage
  modified_base 29: mod_base = OTHER; note = 2' O-methyl nucleotide
  modified_base 30: mod_base = OTHER; note = 2' O-methyl nucleotide
  modified_base 31: mod_base = OTHER; note = 2' O-methyl nucleotide
  modified_base 32: mod_base = OTHER; note = 2' O-methyl nucleotide
  modified_base 33: mod_base = OTHER; note = 2' O-methyl nucleotide
  modified_base 34: mod_base = OTHER; note = 2' O-methyl nucleotide
  modified_base 35: mod_base = OTHER; note = 2' O-methyl nucleotide
  modified_base 36: mod_base = OTHER; note = 2' O-methyl nucleotide
  modified_base 37: mod_base = OTHER; note = 2' O-methyl nucleotide
  modified_base 38: mod_base = OTHER; note = 2' O-methyl nucleotide
  modified_base 39: mod_base = OTHER; note = 2' O-methyl nucleotide
  modified_base 40: mod_base = OTHER; note = 2' O-methyl nucleotide
  modified_base 69: mod_base = OTHER; note = 2' O-methyl nucleotide
  modified_base 70: mod_base = OTHER; note = 2' O-methyl nucleotide
  modified_base 71: mod_base = OTHER; note = 2' O-methyl nucleotide
  modified_base 72: mod_base = OTHER; note = 2' O-methyl nucleotide
  modified_base 73: mod_base = OTHER; note = 2' O-methyl nucleotide
  modified_base 74: mod_base = OTHER; note = 2' O-methyl nucleotide
  modified_base 75: mod_base = OTHER; note = 2' O-methyl nucleotide
  modified_base 76: mod_base = OTHER; note = 2' O-methyl nucleotide
  modified_base 77: mod_base = OTHER; note = 2' O-methyl nucleotide
  modified_base 78: mod_base = OTHER; note = 2' O-methyl nucleotide
  modified_base 79: mod_base = OTHER; note = 2' O-methyl nucleotide
  modified_base 80: mod_base = OTHER; note = 2' O-methyl nucleotide
  modified_base 81: mod_base = OTHER; note = 2' O-methyl nucleotide
  modified_base 82: mod_base = OTHER; note = 2' O-methyl nucleotide
  modified_base 83: mod_base = OTHER; note = 2' O-methyl nucleotide
  modified_base 84: mod_base = OTHER; note = 2' O-methyl nucleotide
  modified_base 85: mod_base = OTHER; note = 2' O-methyl nucleotide
  modified_base 86: mod_base = OTHER; note = 2' O-methyl nucleotide
  modified_base 87: mod_base = OTHER; note = 2' O-methyl nucleotide
  modified_base 88: mod_base = OTHER; note = 2' O-methyl nucleotide
  modified_base 89: mod_base = OTHER; note = 2' O-methyl nucleotide
  modified_base 90: mod_base = OTHER; note = 2' O-methyl nucleotide
  modified_base 91: mod_base = OTHER; note = 2' O-methyl nucleotide
  modified_base 92: mod_base = OTHER; note = 2' O-methyl nucleotide
  modified_base 93: mod_base = OTHER; note = 2' O-methyl nucleotide
  modified_base 94: mod_base = OTHER; note = 2' O-methyl nucleotide
  modified_base 95: mod_base = OTHER; note = 2' O-methyl nucleotide
  modified_base 96: mod_base = OTHER; note = 2' O-methyl nucleotide
  modified_base 97: mod_base = OTHER; note = 2' O-methyl nucleotide and phosphorothioate linkage
  modified_base 98: mod_base = OTHER; note = 2' O-methyl nucleotide and phosphorothioate linkage
  modified_base 99: mod_base = OTHER; note = 2' O-methyl nucleotide and phosphorothioate linkage
  modified_base 100: mod_base = OTHER; note = 2' O-methyl nucleotide
  source 1..100: mol_type = other RNA

SEQ ID NO: 1461 - RNA, 20 nt, synthetic construct
  source 1..20: mol_type = other RNA
gagcaacacagagcccaggg

SEQ ID NO: 1462 - RNA, 20 nt, synthetic construct
  misc_feature 1..20: note = Synthetic
  modified_base 1: mod_base = OTHER; note = 2' O-methyl nucleotide and phosphorothioate linkage
  modified_base 2: mod_base = OTHER; note = 2' O-methyl nucleotide and phosphorothioate linkage
  modified_base 3: mod_base = OTHER; note = 2' O-methyl nucleotide and phosphorothioate linkage
  source 1..20: mol_type = other RNA
gagcaacacagagcccaggg

SEQ ID NO: 1463 - RNA, 100 nt, synthetic construct
  misc_feature 1..100: note = Synthetic
  modified_base 1: mod_base = OTHER; note = 2' O-methyl nucleotide and phosphorothioate linkage
  modified_base 2: mod_base = OTHER; note = 2' O-methyl nucleotide and phosphorothioate linkage
  modified_base 3: mod_base = OTHER; note = 2' O-methyl nucleotide and phosphorothioate linkage
  modified_base 29: mod_base = OTHER; note = 2' O-methyl nucleotide
  modified_base 30: mod_base = OTHER; note = 2' O-methyl nucleotide
  modified_base 31: mod_base = OTHER; note = 2' O-methyl nucleotide
  modified_base 32: mod_base = OTHER; note = 2' O-methyl nucleotide
  modified_base 33: mod_base = OTHER; note = 2' O-methyl nucleotide
  modified_base 34: mod_base = OTHER; note = 2' O-methyl nucleotide
  modified_base 35: mod_base = OTHER; note = 2' O-methyl nucleotide
  modified_base 36: mod_base = OTHER; note = 2' O-methyl nucleotide
  modified_base 37: mod_base = OTHER; note = 2' O-methyl nucleotide
  modified_base 38: mod_base = OTHER; note = 2' O-methyl nucleotide
  modified_base 39: mod_base = OTHER; note = 2' O-methyl nucleotide
  modified_base 40: mod_base = OTHER; note = 2' O-methyl nucleotide
  modified_base 69: mod_base = OTHER; note = 2' O-methyl nucleotide
  modified_base 70: mod_base = OTHER; note = 2' O-methyl nucleotide
  modified_base 71: mod_base = OTHER; note = 2' O-methyl nucleotide
  modified_base 72: mod_base = OTHER; note = 2' O-methyl nucleotide
  modified_base 73: mod_base = OTHER; note = 2' O-methyl nucleotide
  modified_base 74: mod_base = OTHER; note = 2' O-methyl nucleotide
  modified_base 75: mod_base = OTHER; note = 2' O-methyl nucleotide
  modified_base 76: mod_base = OTHER; note = 2' O-methyl nucleotide
  modified_base 77: mod_base = OTHER; note = 2' O-methyl nucleotide
  modified_base 78: mod_base = OTHER; note = 2' O-methyl nucleotide
  modified_base 79: mod_base = OTHER; note = 2' O-methyl nucleotide
  modified_base 80: mod_base = OTHER; note = 2' O-methyl nucleotide
  modified_base 81: mod_base = OTHER; note = 2' O-methyl nucleotide
  modified_base 82: mod_base = OTHER; note = 2' O-methyl nucleotide
  modified_base 83: mod_base = OTHER; note = 2' O-methyl nucleotide
  modified_base 84: mod_base = OTHER; note = 2' O-methyl nucleotide
  modified_base 85: mod_base = OTHER; note = 2' O-methyl nucleotide
  modified_base 86: mod_base = OTHER; note = 2' O-methyl nucleotide
  modified_base 87: mod_base = OTHER; note = 2' O-methyl nucleotide
  modified_base 88: mod_base = OTHER; note = 2' O-methyl nucleotide
  modified_base 89: mod_base = OTHER; note = 2' O-methyl nucleotide
  modified_base 90: mod_base = OTHER; note = 2' O-methyl nucleotide
  modified_base 91: mod_base = OTHER; note = 2' O-methyl nucleotide
  modified_base 92: mod_base = OTHER; note = 2' O-methyl nucleotide
  modified_base 93: mod_base = OTHER; note = 2' O-methyl nucleotide
  modified_base 94: mod_base = OTHER; note = 2' O-methyl nucleotide
  modified_base 95: mod_base = OTHER; note = 2' O-methyl nucleotide
  modified_base 96: mod_base = OTHER; note = 2' O-methyl nucleotide
  modified_base 97: mod_base = OTHER; note = 2' O-methyl nucleotide and phosphorothioate linkage
  modified_base 98: mod_base = OTHER; note = 2' O-methyl nucleotide and phosphorothioate linkage
  modified_base 99: mod_base = OTHER; note = 2' O-methyl nucleotide and phosphorothioate linkage
  modified_base 100: mod_base = OTHER; note = 2' O-methyl nucleotide
  source 1..100: mol_type = other RNA
gagcaacacagagcccaggggttttagagctagaaatagcaagttaaaataaggctagtccgttatcaacttgaaaaagtggcaccgagtcggtgctttt

SEQ ID NO: 1464 - RNA, 20 nt, synthetic construct
  misc_feature 1..20: note = Synthetic
  modified_base 1: mod_base = OTHER; note = 2' O-methyl nucleotide and phosphorothioate linkage
  modified_base 2: mod_base = OTHER; note = 2' O-methyl nucleotide and phosphorothioate linkage
  modified_base 3: mod_base = OTHER; note = 2' O-methyl nucleotide and phosphorothioate linkage
  source 1..20: mol_type = other RNA
ttgaaattcgaattctgcct

SEQ ID NO: 1465 - RNA, 100 nt, synthetic construct; identical to SEQ ID NO: 1331
  misc_feature 1..100: note = Synthetic
  modified_base 1: mod_base = OTHER; note = 2' O-methyl nucleotide and phosphorothioate linkage
  modified_base 2: mod_base = OTHER; note = 2' O-methyl nucleotide and phosphorothioate linkage
  modified_base 3: mod_base = OTHER; note = 2' O-methyl nucleotide and phosphorothioate linkage
  modified_base 29: mod_base = OTHER; note = 2' O-methyl nucleotide
  modified_base 30: mod_base = OTHER; note = 2' O-methyl nucleotide
  modified_base 31: mod_base = OTHER; note = 2' O-methyl nucleotide
  modified_base 32: mod_base = OTHER; note = 2' O-methyl nucleotide
  modified_base 33: mod_base = OTHER; note = 2' O-methyl nucleotide
  modified_base 34: mod_base = OTHER; note = 2' O-methyl nucleotide
  modified_base 35: mod_base = OTHER; note = 2' O-methyl nucleotide
  modified_base 36: mod_base = OTHER; note = 2' O-methyl nucleotide
  modified_base 37: mod_base = OTHER; note = 2' O-methyl nucleotide
  modified_base 38: mod_base = OTHER; note = 2' O-methyl nucleotide
  modified_base 39: mod_base = OTHER; note = 2' O-methyl nucleotide
  modified_base 40: mod_base = OTHER; note = 2' O-methyl nucleotide
  modified_base 69: mod_base = OTHER; note = 2' O-methyl nucleotide
  modified_base 70: mod_base = OTHER; note = 2' O-methyl nucleotide
  modified_base 71: mod_base = OTHER; note = 2' O-methyl nucleotide
  modified_base 72: mod_base = OTHER; note = 2' O-methyl nucleotide
  modified_base 73: mod_base = OTHER; note = 2' O-methyl nucleotide
  modified_base 74: mod_base = OTHER; note = 2' O-methyl nucleotide
  modified_base 75: mod_base = OTHER; note = 2' O-methyl nucleotide
  modified_base 76: mod_base = OTHER; note = 2' O-methyl nucleotide
  modified_base 77: mod_base = OTHER; note = 2' O-methyl nucleotide
  modified_base 78: mod_base = OTHER; note = 2' O-methyl nucleotide
  modified_base 79: mod_base = OTHER; note = 2' O-methyl nucleotide
  modified_base 80: mod_base = OTHER; note = 2' O-methyl nucleotide
  modified_base 81: mod_base = OTHER; note = 2' O-methyl nucleotide
  modified_base 82: mod_base = OTHER; note = 2' O-methyl nucleotide
  modified_base 83: mod_base = OTHER; note = 2' O-methyl nucleotide
  modified_base 84: mod_base = OTHER; note = 2' O-methyl nucleotide
  modified_base 85: mod_base = OTHER; note = 2' O-methyl nucleotide
  modified_base 86: mod_base = OTHER; note = 2' O-methyl nucleotide
  modified_base 87: mod_base = OTHER; note = 2' O-methyl nucleotide
  modified_base 88: mod_base = OTHER; note = 2' O-methyl nucleotide
  modified_base 89: mod_base = OTHER; note = 2' O-methyl nucleotide
  modified_base 90: mod_base = OTHER; note = 2' O-methyl nucleotide
  modified_base 91: mod_base = OTHER; note = 2' O-methyl nucleotide
  modified_base 92: mod_base = OTHER; note = 2' O-methyl nucleotide
  modified_base 93: mod_base = OTHER; note = 2' O-methyl nucleotide
  modified_base 94: mod_base = OTHER; note = 2' O-methyl nucleotide
  modified_base 95: mod_base = OTHER; note = 2' O-methyl nucleotide
  modified_base 96: mod_base = OTHER; note = 2' O-methyl nucleotide
  modified_base 97: mod_base = OTHER; note = 2' O-methyl nucleotide and phosphorothioate linkage
  modified_base 98: mod_base = OTHER; note = 2' O-methyl nucleotide and phosphorothioate linkage
  modified_base 99: mod_base = OTHER; note = 2' O-methyl nucleotide and phosphorothioate linkage
  modified_base 100: mod_base = OTHER; note = 2' O-methyl nucleotide
  source 1..100: mol_type = other RNA

SEQ ID NO: 1466 - RNA, 20 nt, synthetic construct
  misc_feature 1..20: note = Synthetic
  modified_base 1: mod_base = OTHER; note = 2' O-methyl nucleotide and phosphorothioate linkage
  modified_base 2: mod_base = OTHER; note = 2' O-methyl nucleotide and phosphorothioate linkage
  modified_base 3: mod_base = OTHER; note = 2' O-methyl nucleotide and phosphorothioate linkage
  source 1..20: mol_type = other RNA
gtgcgttgctttgagtgggt

SEQ ID NO: 1467 - RNA, 100 nt, synthetic construct; identical to SEQ ID NO: 1332
  misc_feature 1..100: note = Synthetic
  modified_base 1: mod_base = OTHER; note = 2' O-methyl nucleotide and phosphorothioate linkage
  modified_base 2: mod_base = OTHER; note = 2' O-methyl nucleotide and phosphorothioate linkage
  modified_base 3: mod_base = OTHER; note = 2' O-methyl nucleotide and phosphorothioate linkage
  modified_base 29: mod_base = OTHER; note = 2' O-methyl nucleotide
  modified_base 30: mod_base = OTHER; note = 2' O-methyl nucleotide
  modified_base 31: mod_base = OTHER; note = 2' O-methyl nucleotide
  modified_base 32: mod_base = OTHER; note = 2' O-methyl nucleotide
  modified_base 33: mod_base = OTHER; note = 2' O-methyl nucleotide
  modified_base 34: mod_base = OTHER; note = 2' O-methyl nucleotide
  modified_base 35: mod_base = OTHER; note = 2' O-methyl nucleotide
  modified_base 36: mod_base = OTHER; note = 2' O-methyl nucleotide
  modified_base 37: mod_base = OTHER; note = 2' O-methyl nucleotide
  modified_base 38: mod_base = OTHER; note = 2' O-methyl nucleotide
  modified_base 39: mod_base = OTHER; note = 2' O-methyl nucleotide
  modified_base 40: mod_base = OTHER; note = 2' O-methyl nucleotide
  modified_base 69: mod_base = OTHER; note = 2' O-methyl nucleotide
  modified_base 70: mod_base = OTHER; note = 2' O-methyl nucleotide
  modified_base 71: mod_base = OTHER; note = 2' O-methyl nucleotide
  modified_base 72: mod_base = OTHER; note = 2' O-methyl nucleotide
  modified_base 73: mod_base = OTHER; note = 2' O-methyl nucleotide
  modified_base 74: mod_base = OTHER; note = 2' O-methyl nucleotide
  modified_base 75: mod_base = OTHER; note = 2' O-methyl nucleotide
  modified_base 76: mod_base = OTHER; note = 2' O-methyl nucleotide
  modified_base 77: mod_base = OTHER; note = 2' O-methyl nucleotide
  modified_base 78: mod_base = OTHER; note = 2' O-methyl nucleotide
  modified_base 79: mod_base = OTHER; note = 2' O-methyl nucleotide
  modified_base 80: mod_base = OTHER; note = 2' O-methyl nucleotide
  modified_base 81: mod_base = OTHER; note = 2' O-methyl nucleotide
  modified_base 82: mod_base = OTHER; note = 2' O-methyl nucleotide
  modified_base 83: mod_base = OTHER; note = 2' O-methyl nucleotide
  modified_base 84: mod_base = OTHER; note = 2' O-methyl nucleotide
  modified_base 85: mod_base = OTHER; note = 2' O-methyl nucleotide
  modified_base 86: mod_base = OTHER; note = 2' O-methyl nucleotide
  modified_base 87: mod_base = OTHER; note = 2' O-methyl nucleotide
  modified_base 88: mod_base = OTHER; note = 2' O-methyl nucleotide
  modified_base 89: mod_base = OTHER; note = 2' O-methyl nucleotide
  modified_base 90: mod_base = OTHER; note = 2' O-methyl nucleotide
  modified_base 91: mod_base = OTHER; note = 2' O-methyl nucleotide
  modified_base 92: mod_base = OTHER; note = 2' O-methyl nucleotide
  modified_base 93: mod_base = OTHER; note = 2' O-methyl nucleotide
  modified_base 94: mod_base = OTHER; note = 2' O-methyl nucleotide
  modified_base 95: mod_base = OTHER; note = 2' O-methyl nucleotide
  modified_base 96: mod_base = OTHER; note = 2' O-methyl nucleotide
  modified_base 97: mod_base = OTHER; note = 2' O-methyl nucleotide and phosphorothioate linkage
  modified_base 98: mod_base = OTHER; note = 2' O-methyl nucleotide and phosphorothioate linkage
  modified_base 99: mod_base = OTHER; note = 2' O-methyl nucleotide and phosphorothioate linkage
  modified_base 100: mod_base = OTHER; note = 2' O-methyl nucleotide
  source 1..100: mol_type = other RNA

SEQ ID NO: 1468 - DNA, 20 bp, synthetic construct
  misc_feature 1..20: note = Synthetic
  modified_base 1: mod_base = OTHER; note = 2' O-methyl nucleotide and phosphorothioate linkage
  modified_base 2: mod_base = OTHER; note = 2' O-methyl nucleotide and phosphorothioate linkage
  modified_base 3: mod_base = OTHER; note = 2' O-methyl nucleotide and phosphorothioate linkage
  source 1..20: mol_type = other DNA
cagtgcccatgcaatggctt

SEQ ID NO: 1469 - RNA, 100 nt, synthetic construct; identical to SEQ ID NO: 918
  modified_base 4: mod_base = OTHER; note = thymine
  modified_base 10: mod_base = OTHER; note = thymine
  modified_base 15: mod_base = OTHER; note = thymine
  modified_base 19..20: mod_base = OTHER; note = thymine
  misc_feature 1..100: note = Synthetic
  modified_base 1: mod_base = OTHER; note = 2' O-methyl nucleotide and phosphorothioate linkage
  modified_base 2: mod_base = OTHER; note = 2' O-methyl nucleotide and phosphorothioate linkage
  modified_base 3: mod_base = OTHER; note = 2' O-methyl nucleotide and phosphorothioate linkage
  modified_base 29: mod_base = OTHER; note = 2' O-methyl nucleotide
  modified_base 30: mod_base = OTHER; note = 2' O-methyl nucleotide
  modified_base 31: mod_base = OTHER; note = 2' O-methyl nucleotide
  modified_base 32: mod_base = OTHER; note = 2' O-methyl nucleotide
  modified_base 33: mod_base = OTHER; note = 2' O-methyl nucleotide
  modified_base 34: mod_base = OTHER; note = 2' O-methyl nucleotide
  modified_base 35: mod_base = OTHER; note = 2' O-methyl nucleotide
  modified_base 36: mod_base = OTHER; note = 2' O-methyl nucleotide
  modified_base 37: mod_base = OTHER; note = 2' O-methyl nucleotide
  modified_base 38: mod_base = OTHER; note = 2' O-methyl nucleotide
  modified_base 39: mod_base = OTHER; note = 2' O-methyl nucleotide
  modified_base 40: mod_base = OTHER; note = 2' O-methyl nucleotide
  modified_base 69: mod_base = OTHER; note = 2' O-methyl nucleotide
  modified_base 70: mod_base = OTHER; note = 2' O-methyl nucleotide
  modified_base 71: mod_base = OTHER; note = 2' O-methyl nucleotide
  modified_base 72: mod_base = OTHER; note = 2' O-methyl nucleotide
  modified_base 73: mod_base = OTHER; note = 2' O-methyl nucleotide
  modified_base 74: mod_base = OTHER; note = 2' O-methyl nucleotide
  modified_base 75: mod_base = OTHER; note = 2' O-methyl nucleotide
  modified_base 76: mod_base = OTHER; note = 2' O-methyl nucleotide
  modified_base 77: mod_base = OTHER; note = 2' O-methyl nucleotide
  modified_base 78: mod_base = OTHER; note = 2' O-methyl nucleotide
  modified_base 79: mod_base = OTHER; note = 2' O-methyl nucleotide
  modified_base 80: mod_base = OTHER; note = 2' O-methyl nucleotide
  modified_base 81: mod_base = OTHER; note = 2' O-methyl nucleotide
  modified_base 82: mod_base = OTHER; note = 2' O-methyl nucleotide
  modified_base 83: mod_base = OTHER; note = 2' O-methyl nucleotide
  modified_base 84: mod_base = OTHER; note = 2' O-methyl nucleotide
  modified_base 85: mod_base = OTHER; note = 2' O-methyl nucleotide
  modified_base 86: mod_base = OTHER; note = 2' O-methyl nucleotide
  modified_base 87: mod_base = OTHER; note = 2' O-methyl nucleotide
  modified_base 88: mod_base = OTHER; note = 2' O-methyl nucleotide
  modified_base 89: mod_base = OTHER; note = 2' O-methyl nucleotide
  modified_base 90: mod_base = OTHER; note = 2' O-methyl nucleotide
  modified_base 91: mod_base = OTHER; note = 2' O-methyl nucleotide
  modified_base 92: mod_base = OTHER; note = 2' O-methyl nucleotide
  modified_base 93: mod_base = OTHER; note = 2' O-methyl nucleotide
  modified_base 94: mod_base = OTHER; note = 2' O-methyl nucleotide
  modified_base 95: mod_base = OTHER; note = 2' O-methyl nucleotide
  modified_base 96: mod_base = OTHER; note = 2' O-methyl nucleotide
  modified_base 97: mod_base = OTHER; note = 2' O-methyl nucleotide and phosphorothioate linkage
  modified_base 98: mod_base = OTHER; note = 2' O-methyl nucleotide and phosphorothioate linkage
  modified_base 99: mod_base = OTHER; note = 2' O-methyl nucleotide and phosphorothioate linkage
  modified_base 100: mod_base = OTHER; note = 2' O-methyl nucleotide
  source 1..100: mol_type = other RNA

SEQ ID NO: 1470 - RNA, 20 nt, synthetic construct
  modified_base 2: mod_base = OTHER; note = thymine
  modified_base 6: mod_base = OTHER; note = thymine
  modified_base 10..11: mod_base = OTHER; note = thymine
  modified_base 13: mod_base = OTHER; note = thymine
  modified_base 20: mod_base = OTHER; note = thymine
  misc_feature 1..20: note = Synthetic
  modified_base 1: mod_base = OTHER; note = 2' O-methyl nucleotide and phosphorothioate linkage
  modified_base 2: mod_base = OTHER; note = 2' O-methyl nucleotide and phosphorothioate linkage
  modified_base 3: mod_base = OTHER; note = 2' O-methyl nucleotide and phosphorothioate linkage
  source 1..20: mol_type = other RNA
atgagtggcttctgggagat

SEQ ID NO: 1471 - RNA, 100 nt, synthetic construct; identical to SEQ ID NO: 1138
  modified_base 2: mod_base = OTHER; note = thymine
  modified_base 6: mod_base = OTHER; note = thymine
  modified_base 10..11: mod_base = OTHER; note = thymine
  modified_base 13: mod_base = OTHER; note = thymine
  modified_base 20: mod_base = OTHER; note = thymine
  misc_feature 1..100: note = Synthetic
  modified_base 1: mod_base = OTHER; note = 2' O-methyl nucleotide and phosphorothioate linkage
  modified_base 2: mod_base = OTHER; note = 2' O-methyl nucleotide and phosphorothioate linkage
  modified_base 3: mod_base = OTHER; note = 2' O-methyl nucleotide and phosphorothioate linkage
  modified_base 29: mod_base = OTHER; note = 2' O-methyl nucleotide
  modified_base 30: mod_base = OTHER; note = 2' O-methyl nucleotide
  modified_base 31: mod_base = OTHER; note = 2' O-methyl nucleotide
  modified_base 32: mod_base = OTHER; note = 2' O-methyl nucleotide
  modified_base 33: mod_base = OTHER; note = 2' O-methyl nucleotide
  modified_base 34: mod_base = OTHER; note = 2' O-methyl nucleotide
  modified_base 35: mod_base = OTHER; note = 2' O-methyl nucleotide
  modified_base 36: mod_base = OTHER; note = 2' O-methyl nucleotide
  modified_base 37: mod_base = OTHER; note = 2' O-methyl nucleotide
  modified_base 38: mod_base = OTHER; note = 2' O-methyl nucleotide
  modified_base 39: mod_base = OTHER; note = 2' O-methyl nucleotide
  modified_base 40: mod_base = OTHER; note = 2' O-methyl nucleotide
  modified_base 69: mod_base = OTHER; note = 2' O-methyl nucleotide
  modified_base 70: mod_base = OTHER; note = 2' O-methyl nucleotide
  modified_base 71: mod_base = OTHER; note = 2' O-methyl nucleotide
  modified_base 72: mod_base = OTHER; note = 2' O-methyl nucleotide
  modified_base 73: mod_base = OTHER; note = 2' O-methyl nucleotide
  modified_base 74: mod_base = OTHER; note = 2' O-methyl nucleotide
  modified_base 75: mod_base = OTHER; note = 2' O-methyl nucleotide
  modified_base 76: mod_base = OTHER; note = 2' O-methyl nucleotide
  modified_base 77: mod_base = OTHER; note = 2' O-methyl nucleotide
  modified_base 78: mod_base = OTHER; note = 2' O-methyl nucleotide
  modified_base 79: mod_base = OTHER; note = 2' O-methyl nucleotide
  modified_base 80: mod_base = OTHER; note = 2' O-methyl nucleotide
  modified_base 81: mod_base = OTHER; note = 2' O-methyl nucleotide
  modified_base 82: mod_base = OTHER; note = 2' O-methyl nucleotide
  modified_base 83: mod_base = OTHER; note = 2' O-methyl nucleotide
  modified_base 84: mod_base = OTHER; note = 2' O-methyl nucleotide
  modified_base 85: mod_base = OTHER; note = 2' O-methyl nucleotide
  modified_base 86: mod_base = OTHER; note = 2' O-methyl nucleotide
  modified_base 87: mod_base = OTHER; note = 2' O-methyl nucleotide
  modified_base 88: mod_base = OTHER; note = 2' O-methyl nucleotide
  modified_base 89: mod_base = OTHER; note = 2' O-methyl nucleotide
  modified_base 90: mod_base = OTHER; note = 2' O-methyl nucleotide
  modified_base 91: mod_base = OTHER; note = 2' O-methyl nucleotide
  modified_base 92: mod_base = OTHER; note = 2' O-methyl nucleotide
  modified_base 93: mod_base = OTHER; note = 2' O-methyl nucleotide
  modified_base 94: mod_base = OTHER; note = 2' O-methyl nucleotide
  modified_base 95: mod_base = OTHER; note = 2' O-methyl nucleotide
  modified_base 96: mod_base = OTHER; note = 2' O-methyl nucleotide
  modified_base 97: mod_base = OTHER; note = 2' O-methyl nucleotide and phosphorothioate linkage
  modified_base 98: mod_base = OTHER; note = 2' O-methyl nucleotide and phosphorothioate linkage
  modified_base 99: mod_base = OTHER; note = 2' O-methyl nucleotide and phosphorothioate linkage
  modified_base 100: mod_base = OTHER; note = 2' O-methyl nucleotide
  source 1..100: mol_type = other RNA

SEQ ID NO: 1472 - RNA, 100 nt, synthetic construct; identical to SEQ ID NO: 1331
  misc_feature 1..100: note = Synthetic
  modified_base 1: mod_base = OTHER; note = 2' O-methyl nucleotide and phosphorothioate linkage
  modified_base 2: mod_base = OTHER; note = 2' O-methyl nucleotide and phosphorothioate linkage
  modified_base 3: mod_base = OTHER; note = 2' O-methyl nucleotide and phosphorothioate linkage
  modified_base 29: mod_base = OTHER; note = 2' O-methyl nucleotide
  modified_base 30: mod_base = OTHER; note = 2' O-methyl nucleotide
  modified_base 31: mod_base = OTHER; note = 2' O-methyl nucleotide
  modified_base 32: mod_base = OTHER; note = 2' O-methyl nucleotide
  modified_base 33: mod_base = OTHER; note = 2' O-methyl nucleotide
  modified_base 34: mod_base = OTHER; note = 2' O-methyl nucleotide
  modified_base 35: mod_base = OTHER; note = 2' O-methyl nucleotide
  modified_base 36: mod_base = OTHER; note = 2' O-methyl nucleotide
  modified_base 37: mod_base = OTHER; note = 2' O-methyl nucleotide
  modified_base 38: mod_base = OTHER; note = 2' O-methyl nucleotide
  modified_base 39: mod_base = OTHER; note = 2' O-methyl nucleotide
  modified_base 40: mod_base = OTHER; note = 2' O-methyl nucleotide
  modified_base 69: mod_base = OTHER; note = 2' O-methyl nucleotide
  modified_base 70: mod_base = OTHER; note = 2' O-methyl nucleotide
  modified_base 71: mod_base = OTHER; note = 2' O-methyl nucleotide
  modified_base 72: mod_base = OTHER; note = 2' O-methyl nucleotide
  modified_base 73: mod_base = OTHER; note = 2' O-methyl nucleotide
  modified_base 74: mod_base = OTHER; note = 2' O-methyl nucleotide
  modified_base 75: mod_base = OTHER; note = 2' O-methyl nucleotide
  modified_base 76: mod_base = OTHER; note = 2' O-methyl nucleotide
  modified_base 77: mod_base = OTHER; note = 2' O-methyl nucleotide
  modified_base 78: mod_base = OTHER; note = 2' O-methyl nucleotide
  modified_base 79: mod_base = OTHER; note = 2' O-methyl nucleotide
  modified_base 80: mod_base = OTHER; note = 2' O-methyl nucleotide
  modified_base 81: mod_base = OTHER; note = 2' O-methyl nucleotide
  modified_base 82: mod_base = OTHER; note = 2' O-methyl nucleotide
  modified_base 83: mod_base = OTHER; note = 2' O-methyl nucleotide
  modified_base 84: mod_base = OTHER; note = 2' O-methyl nucleotide
  modified_base 85: mod_base = OTHER; note = 2' O-methyl nucleotide
  modified_base 86: mod_base = OTHER; note = 2' O-methyl nucleotide
  modified_base 87: mod_base = OTHER; note = 2' O-methyl nucleotide
  modified_base 88: mod_base = OTHER; note = 2' O-methyl nucleotide
  modified_base 89: mod_base = OTHER; note = 2' O-methyl nucleotide
  modified_base 90: mod_base = OTHER; note = 2' O-methyl nucleotide
  modified_base 91: mod_base = OTHER; note = 2' O-methyl nucleotide
  modified_base 92: mod_base = OTHER; note = 2' O-methyl nucleotide
  modified_base 93: mod_base = OTHER; note = 2' O-methyl nucleotide
  modified_base 94: mod_base = OTHER; note = 2' O-methyl nucleotide
  modified_base 95: mod_base = OTHER; note = 2' O-methyl nucleotide
  modified_base 96: mod_base = OTHER; note = 2' O-methyl nucleotide
  modified_base 97: mod_base = OTHER; note = 2' O-methyl nucleotide and phosphorothioate linkage
  modified_base 98: mod_base = OTHER; note = 2' O-methyl nucleotide and phosphorothioate linkage
  modified_base 99: mod_base = OTHER; note = 2' O-methyl nucleotide and phosphorothioate linkage
  modified_base 100: mod_base = OTHER; note = 2' O-methyl nucleotide
  source 1..100: mol_type = other RNA

SEQ ID NO: 1473 - RNA, 100 nt, synthetic construct; identical to SEQ ID NO: 1332
  misc_feature 1..100: note = Synthetic
  modified_base 1: mod_base = OTHER; note = 2' O-methyl nucleotide and phosphorothioate linkage
  modified_base 2: mod_base = OTHER; note = 2' O-methyl nucleotide and phosphorothioate linkage
  modified_base 3: mod_base = OTHER; note = 2' O-methyl nucleotide and phosphorothioate linkage
  modified_base 29: mod_base = OTHER; note = 2' O-methyl nucleotide
  modified_base 30: mod_base = OTHER; note = 2' O-methyl nucleotide
  modified_base 31: mod_base = OTHER; note = 2' O-methyl nucleotide
  modified_base 32: mod_base = OTHER; note = 2' O-methyl nucleotide
  modified_base 33: mod_base = OTHER; note = 2' O-methyl nucleotide
  modified_base 34: mod_base = OTHER; note = 2' O-methyl nucleotide
  modified_base 35: mod_base = OTHER; note = 2' O-methyl nucleotide
  modified_base 36: mod_base = OTHER; note = 2' O-methyl nucleotide
  modified_base 37: mod_base = OTHER; note = 2' O-methyl nucleotide
  modified_base 38: mod_base = OTHER; note = 2' O-methyl nucleotide
  modified_base 39: mod_base = OTHER; note = 2' O-methyl nucleotide
  modified_base 40: mod_base = OTHER; note = 2' O-methyl nucleotide
  modified_base 69: mod_base = OTHER; note = 2' O-methyl nucleotide
  modified_base 70: mod_base = OTHER; note = 2' O-methyl nucleotide
  modified_base 71: mod_base = OTHER; note = 2' O-methyl nucleotide
  modified_base 72: mod_base = OTHER; note = 2' O-methyl nucleotide
  modified_base 73: mod_base = OTHER; note = 2' O-methyl nucleotide
  modified_base 74: mod_base = OTHER; note = 2' O-methyl nucleotide
  modified_base 75: mod_base = OTHER; note = 2' O-methyl nucleotide
  modified_base 76: mod_base = OTHER; note = 2' O-methyl nucleotide
  modified_base 77: mod_base = OTHER; note = 2' O-methyl nucleotide
  modified_base 78: mod_base = OTHER; note = 2' O-methyl nucleotide
  modified_base 79: mod_base = OTHER; note = 2' O-methyl nucleotide
  modified_base 80: mod_base = OTHER; note = 2' O-methyl nucleotide
  modified_base 81: mod_base = OTHER; note = 2' O-methyl nucleotide
  modified_base 82: mod_base = OTHER; note = 2' O-methyl nucleotide
  modified_base 83: mod_base = OTHER; note = 2' O-methyl nucleotide
  modified_base 84: mod_base = OTHER; note = 2' O-methyl nucleotide
  modified_base 85: mod_base = OTHER; note = 2' O-methyl nucleotide
  modified_base 86: mod_base = OTHER; note = 2' O-methyl nucleotide
  modified_base 87: mod_base = OTHER; note = 2' O-methyl nucleotide
  modified_base 88: mod_base = OTHER; note = 2' O-methyl nucleotide
  modified_base 89: mod_base = OTHER; note = 2' O-methyl nucleotide
  modified_base 90: mod_base = OTHER; note = 2' O-methyl nucleotide
  modified_base 91: mod_base = OTHER; note = 2' O-methyl nucleotide
  modified_base 92: mod_base = OTHER; note = 2' O-methyl nucleotide
  modified_base 93: mod_base = OTHER; note = 2' O-methyl nucleotide
  modified_base 94: mod_base = OTHER; note = 2' O-methyl nucleotide
  modified_base 95: mod_base = OTHER; note = 2' O-methyl nucleotide
  modified_base 96: mod_base = OTHER; note = 2' O-methyl nucleotide
  modified_base 97: mod_base = OTHER; note = 2' O-methyl nucleotide and phosphorothioate linkage
  modified_base 98: mod_base = OTHER; note = 2' O-methyl nucleotide and phosphorothioate linkage
  modified_base 99: mod_base = OTHER; note = 2' O-methyl nucleotide and phosphorothioate linkage
  modified_base 100: mod_base = OTHER; note = 2' O-methyl nucleotide
  source 1..100: mol_type = other RNA

SEQ ID NO: 1474 - RNA, 20 nt, synthetic construct
  misc_feature 1..20: note = Synthetic
  modified_base 1: mod_base = OTHER; note = 2' O-methyl nucleotide and phosphorothioate linkage
  modified_base 2: mod_base = OTHER; note = 2' O-methyl nucleotide and phosphorothioate linkage
  modified_base 3: mod_base = OTHER; note = 2' O-methyl nucleotide and phosphorothioate linkage
  source 1..20: mol_type = other RNA
aatctttgtacataaagaag

SEQ ID NO: 1475 - RNA, 20 nt, synthetic construct
  misc_feature 1..20: note = Synthetic
  modified_base 1: mod_base = OTHER; note = 2' O-methyl nucleotide and phosphorothioate linkage
  modified_base 2: mod_base = OTHER; note = 2' O-methyl nucleotide and phosphorothioate linkage
  modified_base 3: mod_base = OTHER; note = 2' O-methyl nucleotide and phosphorothioate linkage
  source 1..20: mol_type = other RNA
tacaaaaaccttctatacag

SEQ ID NO: 1476 - RNA, 100 nt, synthetic construct; identical to SEQ ID NO: 911
  misc_feature 1..100: note = Synthetic
  modified_base 1: mod_base = OTHER; note = 2' O-methyl nucleotide and phosphorothioate linkage
  modified_base 2: mod_base = OTHER; note = 2' O-methyl nucleotide and phosphorothioate linkage
  modified_base 3: mod_base = OTHER; note = 2' O-methyl nucleotide and phosphorothioate linkage
  modified_base 29: mod_base = OTHER; note = 2' O-methyl nucleotide
  modified_base 30: mod_base = OTHER; note = 2' O-methyl nucleotide
  modified_base 31: mod_base = OTHER; note = 2' O-methyl nucleotide
  modified_base 32: mod_base = OTHER; note = 2' O-methyl nucleotide
  modified_base 33: mod_base = OTHER; note = 2' O-methyl nucleotide
  modified_base 34: mod_base = OTHER; note = 2' O-methyl nucleotide
  modified_base 35: mod_base = OTHER; note = 2' O-methyl nucleotide
  modified_base 36: mod_base = OTHER; note = 2' O-methyl nucleotide
  modified_base 37: mod_base = OTHER; note = 2' O-methyl nucleotide
  modified_base 38: mod_base = OTHER; note = 2' O-methyl nucleotide
  modified_base 39: mod_base = OTHER; note = 2' O-methyl nucleotide
  modified_base 40: mod_base = OTHER; note = 2' O-methyl nucleotide
  modified_base 69: mod_base = OTHER; note = 2' O-methyl nucleotide
  modified_base 70: mod_base = OTHER; note = 2' O-methyl nucleotide
  modified_base 71: mod_base = OTHER; note = 2' O-methyl nucleotide
  modified_base 72: mod_base = OTHER; note = 2' O-methyl nucleotide
  modified_base 73: mod_base = OTHER; note = 2' O-methyl nucleotide
  modified_base 74: mod_base = OTHER; note = 2' O-methyl nucleotide
  modified_base 75: mod_base = OTHER; note = 2' O-methyl nucleotide
  modified_base 76: mod_base = OTHER; note = 2' O-methyl nucleotide
  modified_base 77: mod_base = OTHER; note = 2' O-methyl nucleotide
  modified_base 78: mod_base = OTHER; note = 2' O-methyl nucleotide
  modified_base 79: mod_base = OTHER; note = 2' O-methyl nucleotide
  modified_base 80: mod_base = OTHER; note = 2' O-methyl nucleotide
  modified_base 81: mod_base = OTHER; note = 2' O-methyl nucleotide
  modified_base 82: mod_base = OTHER; note = 2' O-methyl nucleotide
  modified_base 83: mod_base = OTHER; note = 2' O-methyl nucleotide
  modified_base 84: mod_base = OTHER; note = 2' O-methyl nucleotide
  modified_base 85: mod_base = OTHER; note = 2' O-methyl nucleotide
  modified_base 86: mod_base = OTHER; note = 2' O-methyl nucleotide
  modified_base 87: mod_base = OTHER; note = 2' O-methyl nucleotide
  modified_base 88: mod_base = OTHER; note = 2' O-methyl nucleotide
  modified_base 89: mod_base = OTHER; note = 2' O-methyl nucleotide
  modified_base 90: mod_base = OTHER; note = 2' O-methyl nucleotide
  modified_base 91: mod_base = OTHER; note = 2' O-methyl nucleotide
  modified_base 92: mod_base = OTHER; note = 2' O-methyl nucleotide
  modified_base 93: mod_base = OTHER; note = 2' O-methyl nucleotide
  modified_base 94: mod_base = OTHER; note = 2' O-methyl nucleotide
  modified_base 95: mod_base = OTHER; note = 2' O-methyl nucleotide
  modified_base 96: mod_base = OTHER; note = 2' O-methyl nucleotide
  modified_base 97: mod_base = OTHER; note = 2' O-methyl nucleotide and phosphorothioate linkage
  modified_base 98: mod_base = OTHER; note = 2' O-methyl nucleotide and phosphorothioate linkage
  modified_base 99: mod_base = OTHER; note = 2' O-methyl nucleotide and phosphorothioate linkage
  modified_base 100: mod_base = OTHER; note = 2' O-methyl nucleotide
  source 1..100: mol_type = other RNA

SEQ ID NO: 1477 - RNA, 100 nt, synthetic construct; identical to SEQ ID NO: 912
  misc_feature 1..100: note = Synthetic
  modified_base 1: mod_base = OTHER; note = 2' O-methyl nucleotide and phosphorothioate linkage
  modified_base 2: mod_base = OTHER; note = 2' O-methyl nucleotide and phosphorothioate linkage
  modified_base 3: mod_base = OTHER; note = 2' O-methyl nucleotide and phosphorothioate linkage
  modified_base 29: mod_base = OTHER; note = 2' O-methyl nucleotide
  modified_base 30: mod_base = OTHER; note = 2' O-methyl nucleotide
  modified_base 31: mod_base = OTHER; note = 2' O-methyl nucleotide
  modified_base 32: mod_base = OTHER; note = 2' O-methyl nucleotide
  modified_base 33: mod_base = OTHER; note = 2' O-methyl nucleotide
  modified_base 34: mod_base = OTHER; note = 2' O-methyl nucleotide
  modified_base 35: mod_base = OTHER; note = 2' O-methyl nucleotide
  modified_base 36: mod_base = OTHER; note = 2' O-methyl nucleotide
  modified_base 37: mod_base = OTHER; note = 2' O-methyl nucleotide
  modified_base 38: mod_base = OTHER; note = 2' O-methyl nucleotide
  modified_base 39: mod_base = OTHER; note = 2' O-methyl nucleotide
  modified_base 40: mod_base = OTHER; note = 2' O-methyl nucleotide
  modified_base 69: mod_base = OTHER; note = 2' O-methyl nucleotide
  modified_base 70: mod_base = OTHER; note = 2' O-methyl nucleotide
  modified_base 71: mod_base = OTHER; note = 2' O-methyl nucleotide
  modified_base 72: mod_base = OTHER; note = 2' O-methyl nucleotide
  modified_base 73: mod_base = OTHER; note = 2' O-methyl nucleotide
  modified_base 74: mod_base = OTHER; note = 2' O-methyl nucleotide
  modified_base 75: mod_base = OTHER; note = 2' O-methyl nucleotide
  modified_base 76: mod_base = OTHER; note = 2' O-methyl nucleotide
  modified_base 77: mod_base = OTHER; note = 2' O-methyl nucleotide
  modified_base 78: mod_base = OTHER; note = 2' O-methyl nucleotide
  modified_base 79: mod_base = OTHER; note = 2' O-methyl nucleotide
  modified_base 80: mod_base = OTHER; note = 2' O-methyl nucleotide
  modified_base 81: mod_base = OTHER; note = 2' O-methyl nucleotide
  modified_base 82: mod_base = OTHER; note = 2' O-methyl nucleotide
  modified_base 83: mod_base = OTHER; note = 2' O-methyl nucleotide
  modified_base 84: mod_base = OTHER; note = 2' O-methyl nucleotide
  modified_base 85: mod_base = OTHER; note = 2' O-methyl nucleotide
  modified_base 86: mod_base = OTHER; note = 2' O-methyl nucleotide
  modified_base 87: mod_base = OTHER; note = 2' O-methyl nucleotide
  modified_base 88: mod_base = OTHER; note = 2' O-methyl nucleotide
  modified_base 89: mod_base = OTHER; note = 2' O-methyl nucleotide
  modified_base 90: mod_base = OTHER; note = 2' O-methyl nucleotide
  modified_base 91: mod_base = OTHER; note = 2' O-methyl nucleotide
  modified_base 92: mod_base = OTHER; note = 2' O-methyl nucleotide
  modified_base 93: mod_base = OTHER; note = 2' O-methyl nucleotide
  modified_base 94: mod_base = OTHER; note = 2' O-methyl nucleotide
  modified_base 95: mod_base = OTHER; note = 2' O-methyl nucleotide
  modified_base 96: mod_base = OTHER; note = 2' O-methyl nucleotide
  modified_base 97: mod_base = OTHER; note = 2' O-methyl nucleotide and phosphorothioate linkage
  modified_base 98: mod_base = OTHER; note = 2' O-methyl nucleotide and phosphorothioate linkage
  modified_base 99: mod_base = OTHER; note = 2' O-methyl nucleotide and phosphorothioate linkage
  modified_base 100: mod_base = OTHER; note = 2' O-methyl nucleotide
  source 1..100: mol_type = other RNA

SEQ ID NO: 1478 - RNA, 100 nt, synthetic construct; identical to SEQ ID NO: 913
  misc_feature 1..100: note = Synthetic
  modified_base 1: mod_base = OTHER; note = 2' O-methyl nucleotide and phosphorothioate linkage
  modified_base 2: mod_base = OTHER; note = 2' O-methyl nucleotide and phosphorothioate linkage
  modified_base 3: mod_base = OTHER; note = 2' O-methyl nucleotide and phosphorothioate linkage
  modified_base 29: mod_base = OTHER; note = 2' O-methyl nucleotide
  modified_base 30: mod_base = OTHER; note = 2' O-methyl nucleotide
  modified_base 31: mod_base = OTHER; note = 2' O-methyl nucleotide
  modified_base 32: mod_base = OTHER; note = 2' O-methyl nucleotide
  modified_base 33: mod_base = OTHER; note = 2' O-methyl nucleotide
  modified_base 34: mod_base = OTHER; note = 2' O-methyl nucleotide
  modified_base 35: mod_base = OTHER; note = 2' O-methyl nucleotide
  modified_base 36: mod_base = OTHER; note = 2' O-methyl nucleotide
  modified_base 37: mod_base = OTHER; note = 2' O-methyl nucleotide
  modified_base 38: mod_base = OTHER; note = 2' O-methyl nucleotide
  modified_base 39: mod_base = OTHER; note = 2' O-methyl nucleotide
  modified_base 40: mod_base = OTHER; note = 2' O-methyl nucleotide
  modified_base 69: mod_base = OTHER; note = 2' O-methyl nucleotide
  modified_base 70: mod_base = OTHER; note = 2' O-methyl nucleotide
  modified_base 71: mod_base = OTHER; note = 2' O-methyl nucleotide
  modified_base 72: mod_base = OTHER; note = 2' O-methyl nucleotide
  modified_base 73: mod_base = OTHER; note = 2' O-methyl nucleotide
  modified_base 74: mod_base = OTHER; note = 2' O-methyl nucleotide
  modified_base 75: mod_base = OTHER; note = 2' O-methyl nucleotide
  modified_base 76: mod_base = OTHER; note = 2' O-methyl nucleotide
  modified_base 77: mod_base = OTHER; note = 2' O-methyl nucleotide
  modified_base 78: mod_base = OTHER; note = 2' O-methyl nucleotide
  modified_base 79: mod_base = OTHER; note = 2' O-methyl nucleotide
  modified_base 80: mod_base = OTHER; note = 2' O-methyl nucleotide
  modified_base 81: mod_base = OTHER; note = 2' O-methyl nucleotide
  modified_base 82: mod_base = OTHER; note = 2' O-methyl nucleotide
  modified_base 83: mod_base = OTHER; note = 2' O-methyl nucleotide
  modified_base 84: mod_base = OTHER; note = 2' O-methyl nucleotide
  modified_base 85: mod_base = OTHER; note = 2' O-methyl nucleotide
  modified_base 86: mod_base = OTHER; note = 2' O-methyl nucleotide
  modified_base 87: mod_base = OTHER; note = 2' O-methyl nucleotide
  modified_base 88: mod_base = OTHER; note = 2' O-methyl nucleotide
  modified_base 89: mod_base = OTHER; note = 2' O-methyl nucleotide
  modified_base 90: mod_base = OTHER; note = 2' O-methyl nucleotide
  modified_base 91: mod_base = OTHER; note = 2' O-methyl nucleotide
  modified_base 92: mod_base = OTHER; note = 2' O-methyl nucleotide
  modified_base 93: mod_base = OTHER; note = 2' O-methyl nucleotide
  modified_base 94: mod_base = OTHER; note = 2' O-methyl nucleotide
  modified_base 95: mod_base = OTHER; note = 2' O-methyl nucleotide
  modified_base 96: mod_base = OTHER; note = 2' O-methyl nucleotide
  modified_base 97: mod_base = OTHER; note = 2' O-methyl nucleotide and phosphorothioate linkage
  modified_base 98: mod_base = OTHER; note = 2' O-methyl nucleotide and phosphorothioate linkage
  modified_base 99: mod_base = OTHER; note = 2' O-methyl nucleotide and phosphorothioate linkage
  modified_base 100: mod_base = OTHER; note = 2' O-methyl nucleotide
  source 1..100: mol_type = other RNA

SEQ ID NO: 1479 - RNA, 100 nt, synthetic construct; identical to SEQ ID NO: 31
  misc_feature 1..100: note = Synthetic
  modified_base 1: mod_base = OTHER; note = 2' O-methyl nucleotide and phosphorothioate linkage
  modified_base 2: mod_base = OTHER; note = 2' O-methyl nucleotide and phosphorothioate linkage
  modified_base 3: mod_base = OTHER; note = 2' O-methyl nucleotide and phosphorothioate linkage
  modified_base 29: mod_base = OTHER; note = 2' O-methyl nucleotide
  modified_base 30: mod_base = OTHER; note = 2' O-methyl nucleotide
  modified_base 31: mod_base = OTHER; note = 2' O-methyl nucleotide
  modified_base 32: mod_base = OTHER; note = 2' O-methyl nucleotide
  modified_base 33: mod_base = OTHER; note = 2' O-methyl nucleotide
  modified_base 34: mod_base = OTHER; note = 2' O-methyl nucleotide
  modified_base 35: mod_base = OTHER; note = 2' O-methyl nucleotide
  modified_base 36: mod_base = OTHER; note = 2' O-methyl nucleotide
  modified_base 37: mod_base = OTHER; note = 2' O-methyl nucleotide
  modified_base 38: mod_base = OTHER; note = 2' O-methyl nucleotide
  modified_base 39: mod_base = OTHER; note = 2' O-methyl nucleotide
  modified_base 40: mod_base = OTHER; note = 2' O-methyl nucleotide
  modified_base 69: mod_base = OTHER; note = 2' O-methyl nucleotide
  modified_base 70: mod_base = OTHER; note = 2' O-methyl nucleotide
  modified_base 71: mod_base = OTHER; note = 2' O-methyl nucleotide
  modified_base 72: mod_base = OTHER; note = 2' O-methyl nucleotide
  modified_base 73: mod_base = OTHER; note = 2' O-methyl nucleotide
  modified_base 74: mod_base = OTHER; note = 2' O-methyl nucleotide
  modified_base 75: mod_base = OTHER; note = 2' O-methyl nucleotide
  modified_base 76: mod_base = OTHER; note = 2' O-methyl nucleotide
  modified_base 77: mod_base = OTHER; note = 2' O-methyl nucleotide
  modified_base 78: mod_base = OTHER; note = 2' O-methyl nucleotide
  modified_base 79: mod_base = OTHER; note = 2' O-methyl nucleotide
  modified_base 80: mod_base = OTHER; note = 2' O-methyl nucleotide
  modified_base 81: mod_base = OTHER; note = 2' O-methyl nucleotide
  modified_base 82: mod_base = OTHER; note = 2' O-methyl nucleotide
  modified_base 83: mod_base = OTHER; note = 2' O-methyl nucleotide
  modified_base 84: mod_base = OTHER; note = 2' O-methyl nucleotide
  modified_base 85: mod_base = OTHER; note = 2' O-methyl nucleotide
  modified_base 86: mod_base = OTHER; note = 2' O-methyl nucleotide
  modified_base 87: mod_base = OTHER; note = 2' O-methyl nucleotide
  modified_base 88: mod_base = OTHER; note = 2' O-methyl nucleotide
  modified_base 89: mod_base = OTHER; note = 2' O-methyl nucleotide
  modified_base 90: mod_base = OTHER; note = 2' O-methyl nucleotide
  modified_base 91: mod_base = OTHER; note = 2' O-methyl nucleotide
  modified_base 92: mod_base = OTHER; note = 2' O-methyl nucleotide
  modified_base 93: mod_base = OTHER; note = 2' O-methyl nucleotide
  modified_base 94: mod_base = OTHER; note = 2' O-methyl nucleotide
  modified_base 95: mod_base = OTHER; note = 2' O-methyl nucleotide
  modified_base 96: mod_base = OTHER; note = 2' O-methyl nucleotide
  modified_base 97: mod_base = OTHER; note = 2' O-methyl nucleotide and phosphorothioate linkage
  modified_base 98: mod_base = OTHER; note = 2' O-methyl nucleotide and phosphorothioate linkage
  modified_base 99: mod_base = OTHER; note = 2' O-methyl nucleotide and phosphorothioate linkage
  modified_base 100: mod_base = OTHER; note = 2' O-methyl nucleotide
  source 1..100: mol_type = other RNA

SEQ ID NO: 1480 - RNA, 4432 nt, synthetic construct
  misc_feature 1..4432: note = Synthetic
  source 1..4432: mol_type = other RNA
aggaaataagagagaaaagaagagtaagaagaaatataagagccaccatggacaagaagtacagcatcggcctggacatcggcaccaactctgtgggctgggccgtgatcaccgacgagtacaaggtgcccagcaagaaattcaaggtgctgggcaacaccgaccggcacagcatcaagaagaacctgatcggagccctgctgttcgacagcggcgaaacagccgaggccacccggctgaagagaaccgccagaagaagatacaccagacggaagaaccggatctgctatctgcaagagatcttcagcaacgagatggccaaggtggacgacagcttcttccacagactggaagagtccttcctggtggaagaggataagaagcacgagcggcaccccatcttcggcaacatcgtggacgaggtggcctaccacgagaagtaccccaccatctaccacctgagaaagaaactggtggacagcaccgacaaggccgacctgcggctgatctatctggccctggcccacatgatcaagttccggggccacttcctgatcgagggcgacctgaaccccgacaacagcgacgtggacaagctgttcatccagctggtgcagacctacaaccagctgttcgaggaaaaccccatcaacgccagcggcgtggacgccaaggccatcctgtctgccagactgagcaagagcagacggctggaaaatctgatcgcccagctgcccggcgagaagaagaatggcctgttcggaaacctgattgccctgagcctgggcctgacccccaacttcaagagcaacttcgacctggccgaggatgccaaactgcagctgagcaaggacacctacgacgacgacctggacaacctgctggcccagatcggcgaccagtacgccgacctgtttctggccgccaagaacctgtccgacgccatcctgctgagcgacatcctgagagtgaacaccgagatcaccaaggcccccctgagcgcctctatgatcaagagatacgacgagcaccaccaggacctgaccctgctgaaagctctcgtgcggcagcagctgcctgagaagtacaaagagattttcttcgaccagagcaagaacggctacgccggctacattgacggcggagccagccaggaagagttctacaagttcatcaagcccatcctggaaaagatggacggcaccgaggaactgctcgtgaagctgaacagagaggacctgctgcggaagcagcggaccttcgacaacggcagcatcccccaccagatccacctgggagagctgcacgccattctgcggcggcaggaagatttttacccattcctgaaggacaaccgggaaaagatcgagaagatcctgaccttccgcatcccctactacgtgggccctctggccaggggaaacagcagattcgcctggatgaccagaaagagcgaggaaaccatcaccccctggaacttcgaggaagtggtggacaagggcgcttccgcccagagcttcatcgagcggatgaccaacttcgataagaacctgcccaacgagaaggtgctgcccaagcacagcctgctgtacgagtacttcaccgtgtataacgagctgaccaaagtgaaatacgtgaccgagggaatgagaaagcccgccttcctgagcggcgagcagaaaaaggccatcgtggacctgctgttcaagaccaaccggaaagtgaccgtgaagcagctgaaagaggactacttcaagaaaatcgagtgcttcgactccgtggaaatctccggcgtggaagatcggttcaacgcctccctgggcacataccacgatctgctgaaaattatcaaggacaaggacttcctggacaatgaggaaaacgaggacattctggaagatatcgtgctgaccctgacactgtttgaggacagagagatgatcgaggaacggctgaaaacctatgcccacctgttcgacgacaaagtgatgaagcagctgaagcggcggagatacaccggctggggcaggctgagccggaagctgatcaacggcatccgggacaagcagtccggcaagacaatcctggatttcctgaagtccgacggcttcgccaacagaaacttcatgcagctgatccacgacgacagcctgacctttaaagaggacatccagaaagcccaggtgtccggccagggcgatagcctgcacgagcacattgccaatctggccggcagccccgccattaagaagggcatcctgcagacagtgaaggtggtggacgagctcgtgaaagtgatgggccggcacaagcccgagaacatcgtgatcgaaatggccagagagaaccagaccacccagaagggacagaagaacagccgcgagagaatgaagcggatcgaagagggcatcaaagagctgggcagccagatcctgaaagaacaccccgtggaaaacacccagctgcagaacgagaagctgtacctgtactacctgcagaatgggcgggatatgtacgtggaccaggaactggacatcaaccggctgtccgactacgatgtggaccatatcgtgcctcagagctttctgaaggacgactccatcgacaacaaggtgctgaccagaagcgacaagaaccggggcaagagcgacaacgtgccctccgaagaggtcgtgaagaagatgaagaactactggcggcagctgctgaacgccaagctgattacccagagaaagttcgacaatctgaccaaggccgagagaggcggcctgagcgaactggataaggccggcttcatcaagagacagctggtggaaacccggcagatcacaaagcacgtggcacagatcctggactcccggatgaacactaagtacgacgagaatgacaagctgatccgggaagtgaaagtgatcaccctgaagtccaagctggtgtccgatttccggaaggatttccagttttacaaagtgcgcgagatcaacaactaccaccacgcccacgacgcctacctgaacgccgtcgtgggaaccgccctgatcaaaaagtaccctaagctggaaagcgagttcgtgtacggcgactacaaggtgtacgacgtgcggaagatgatcgccaagagcgagcaggaaatcggcaaggctaccgccaagtacttcttctacagcaacatcatgaactttttcaagaccgagattaccctggccaacggcgagatccggaagcggcctctgatcgagacaaacggcgaaaccggggagatcgtgtgggataagggccgggattttgccaccgtgcggaaagtgctgagcatgccccaagtgaatatcgtgaaaaagaccgaggtgcagacaggcggcttcagcaaagagtctatcctgcccaagaggaacagcgataagctgatcgccagaaagaaggactgggaccctaagaagtacggcggcttcgacagccccaccgtggcctattctgtgctggtggtggccaaagtggaaaagggcaagtccaagaaactgaagagtgtgaaagagctgctggggatcaccatcatggaaagaagcagcttcgagaagaatcccatcgactttctggaagccaagggctacaaagaagtgaaaaaggacctgatcatcaagctgcctaagtactccctgttcgagctggaaaacggccggaagagaatgctggcctctgccggcgaactgcagaagggaaacgaactggccctgccctccaaatatgtgaacttcctgtacctggccagccactatgagaagctgaagggctcccccgaggataatgagcagaaacagctgtttgtggaacagcacaagcactacctggacgagatcatcgagcagatcagcgagttctccaagagagtgatcctggccgacgctaatctggacaaagtgctgtccgcctacaacaagcaccgggataagcccatcagagagcaggccgagaatatcatccacctgtttaccctgaccaatctgggagcccctgccgccttcaagtactttgacaccaccatcgaccggaagaggtacaccagcaccaaagaggtgctggacgccaccctgatccaccagagcatcaccggcctgtacgagacacggatcgacctgtctcagctgggaggtgacggcggatcccctgctgctaaacgtgttaagcttgatgggggtagcccggcagccaagagagtcaaactcgactagatggtttatattgcggccgcttaattaagctgccttctgcggggcttgccttctggccatgcccttcttctctcccttgcacctgtacctcttggtctttgaataaagcctgagtaggaagtctagaaaaaaaaaaaaaaaaaaaaaaaaaaaaaaaaaaaaaaaaaaaaaaaaaaaaaaaaaaaaaaaaaaaaaaaaaaaaaaaa

SEQ ID NO: 1481 - RNA, 4207 nt, synthetic construct
  source 1..4207: mol_type = other RNA
atggacaagaagtacagcatcggcctggacatcggcaccaactctgtgggctgggccgtgatcaccgacgagtacaaggtgcccagcaagaaattcaaggtgctgggcaacaccgaccggcacagcatcaagaagaacctgatcggagccctgctgttcgacagcggcgaaacagccgaggccacccggctgaagagaaccgccagaagaagatacaccagacggaagaaccggatctgctatctgcaagagatcttcagcaacgagatggccaaggtggacgacagcttcttccacagactggaagagtccttcctggtggaagaggataagaagcacgagcggcaccccatcttcggcaacatcgtggacgaggtggcctaccacgagaagtaccccaccatctaccacctgagaaagaaactggtggacagcaccgacaaggccgacctgcggctgatctatctggccctggcccacatgatcaagttccggggccacttcctgatcgagggcgacctgaaccccgacaacagcgacgtggacaagctgttcatccagctggtgcagacctacaaccagctgttcgaggaaaaccccatcaacgccagcggcgtggacgccaaggccatcctgtctgccagactgagcaagagcagacggctggaaaatctgatcgcccagctgcccggcgagaagaagaatggcctgttcggaaacctgattgccctgagcctgggcctgacccccaacttcaagagcaacttcgacctggccgaggatgccaaactgcagctgagcaaggacacctacgacgacgacctggacaacctgctggcccagatcggcgaccagtacgccgacctgtttctggccgccaagaacctgtccgacgccatcctgctgagcgacatcctgagagtgaacaccgagatcaccaaggcccccctgagcgcctctatgatcaagagatacgacgagcaccaccaggacctgaccctgctgaaagctctcgtgcggcagcagctgcctgagaagtacaaagagattttcttcgaccagagcaagaacggctacgccggctacattgacggcggagccagccaggaagagttctacaagttcatcaagcccatcctggaaaagatggacggcaccgaggaactgctcgtgaagctgaacagagaggacctgctgcggaagcagcggaccttcgacaacggcagcatcccccaccagatccacctgggagagctgcacgccattctgcggcggcaggaagatttttacccattcctgaaggacaaccgggaaaagatcgagaagatcctgaccttccgcatcccctactacgtgggccctctggccaggggaaacagcagattcgcctggatgaccagaaagagcgaggaaaccatcaccccctggaacttcgaggaagtggtggacaagggcgcttccgcccagagcttcatcgagcggatgaccaacttcgataagaacctgcccaacgagaaggtgctgcccaagcacagcctgctgtacgagtacttcaccgtgtataacgagctgaccaaagtgaaatacgtgaccgagggaatgagaaagcccgccttcctgagcggcgagcagaaaaaggccatcgtggacctgctgttcaagaccaaccggaaagtgaccgtgaagcagctgaaagaggactacttcaagaaaatcgagtgcttcgactccgtggaaatctccggcgtggaagatcggttcaacgcctccctgggcacataccacgatctgctgaaaattatcaaggacaaggacttcctggacaatgaggaaaacgaggacattctggaagatatcgtgctgaccctgacactgtttgaggacagagagatgatcgaggaacggctgaaaacctatgcccacctgttcgacgacaaagtgatgaagcagctgaagcggcggagatacaccggctggggcaggctgagccggaagctgatcaacggcatccgggacaagcagtccggcaagacaatcctggatttcctgaagtccgacggcttcgccaacagaaacttcatgcagctgatccacgacgacagcctgacctttaaagaggacatccagaaagcccaggtgtccggccagggcgatagcctgcacgagcacattgccaatctggccggcagccccgccattaagaagggcatcctgcagacagtgaaggtggtggacgagctcgtgaaagtgatgggccggcacaagcccgagaacatcgtgatcgaaatggccagagagaaccagaccacccagaagggacagaagaacagccgcgagagaatgaagcggatcgaagagggcatcaaagagctgggcagccagatcctgaaagaacaccccgtggaaaacacccagctgcagaacgagaagctgtacctgtactacctgcagaatgggcgggatatgtacgtggaccaggaactggacatcaaccggctgtccgactacgatgtggaccatatcgtgcctcagagctttctgaaggacgactccatcgacaacaaggtgctgaccagaagcgacaagaaccggggcaagagcgacaacgtgccctccgaagaggtcgtgaagaagatgaagaactactggcggcagctgctgaacgccaagctgattacccagagaaagttcgacaatctgaccaaggccgagagaggcggcctgagcgaactggataaggccggcttcatcaagagacagctggtggaaacccggcagatcacaaagcacgtggcacagatcctggactcccggatgaacactaagtacgacgagaatgacaagctgatccgggaagtgaaagtgatcaccctgaagtccaagctggtgtccgatttccggaaggatttccagttttacaaagtgcgcgagatcaacaactaccaccacgcccacgacgcctacctgaacgccgtcgtgggaaccgccctgatcaaaaagtaccctaagctggaaagcgagttcgtgtacggcgactacaaggtgtacgacgtgcggaagatgatcgccaagagcgagcaggaaatcggcaaggctaccgccaagtacttcttctacagcaacatcatgaactttttcaagaccgagattaccctggccaacggcgagatccggaagcggcctctgatcgagacaaacggcgaaaccggggagatcgtgtgggataagggccgggattttgccaccgtgcggaaagtgctgagcatgccccaagtgaatatcgtgaaaaagaccgaggtgcagacaggcggcttcagcaaagagtctatcctgcccaagaggaacagcgataagctgatcgccagaaagaaggactgggaccctaagaagtacggcggcttcgacagccccaccgtggcctattctgtgctggtggtggccaaagtggaaaagggcaagtccaagaaactgaagagtgtgaaagagctgctggggatcaccatcatggaaagaagcagcttcgagaagaatcccatcgactttctggaagccaagggctacaaagaagtgaaaaaggacctgatcatcaagctgcctaagtactccctgttcgagctggaaaacggccggaagagaatgctggcctctgccggcgaactgcagaagggaaacgaactggccctgccctccaaatatgtgaacttcctgtacctggccagccactatgagaagctgaagggctcccccgaggataatgagcagaaacagctgtttgtggaacagcacaagcactacctggacgagatcatcgagcagatcagcgagttctccaagagagtgatcctggccgacgctaatctggacaaagtgctgtccgcctacaacaagcaccgggataagcccatcagagagcaggccgagaatatcatccacctgtttaccctgaccaatctgggagcccctgccgccttcaagtactttgacaccaccatcgaccggaagaggtacaccagcaccaaagaggtgctggacgccaccctgatccaccagagcatcaccggcctgtacgagacacggatcgacctgtctcagctgggaggtgacggcggatcccctgctgctaaacgtgttaagcttgatgggggtagcccggcagccaagagagtcaaactcgactagatggtttatattgcggccgcttaattaa

SEQ ID NO: 1482 - RNA, 40 nt, synthetic construct
  source 1..40: mol_type = other RNA
gagctttgttttatatatttattcatctgggaggcagaac

SEQ ID NO: 1483 - RNA, 5173 nt, synthetic construct
  source 1..5173: mol_type = other RNA
gtgcaatcgcgggaagccagggtttccagctaggacacagcaggtcgtgatccgggtcgggacactgcctggcagaggctgcgagcatggggccctggggctggaaattgcgctggaccgtcgccttgctcctcgccgcggcggggactgcagtgggcgacagatgcgaaagaaacgagttccagtgccaagacgggaaatgcatctcctacaagtgggtctgcgatggcagcgctgagtgccaggatggctctgatgagtcccaggagacgtgcttgtctgtcacctgcaaatccggggacttcagctgtgggggccgtgtcaaccgctgcattcctcagttctggaggtgcgatggccaagtggactgcgacaacggctcagacgagcaaggctgtccccccaagacgtgctcccaggacgagtttcgctgccacgatgggaagtgcatctctcggcagttcgtctgtgactcagaccgggactgcttggacggctcagacgaggcctcctgcccggtgctcacctgtggtcccgccagcttccagtgcaacagctccacctgcatcccccagctgtgggcctgcgacaacgaccccgactgcgaagatggctcggatgagtggccgcagcgctgtaggggtctttacgtgttccaaggggacagtagcccctgctcggccttcgagttccactgcctaagtggcgagtgcatccactccagctggcgctgtgatggtggccccgactgcaaggacaaatctgacgaggaaaactgcgctgtggccacctgtcgccctgacgaattccagtgctctgatggaaactgcatccatggcagccggcagtgtgaccgggaatatgactgcaaggacatgagcgatgaagttggctgcgttaatgtgacactctgcgagggacccaacaagttcaagtgtcacagcggcgaatgcatcaccctggacaaagtctgcaacatggctagagactgccgggactggtcagatgaacccatcaaagagtgcgggaccaacgaatgcttggacaacaacggcggctgttcccacgtctgcaatgaccttaagatcggctacgagtgcctgtgccccgacggcttccagctggtggcccagcgaagatgcgaagatatcgatgagtgtcaggatcccgacacctgcagccagctctgcgtgaacctggagggtggctacaagtgccagtgtgaggaaggcttccagctggacccccacacgaaggcctgcaaggctgtgggctccatcgcctacctcttcttcaccaaccggcacgaggtcaggaagatgacgctggaccggagcgagtacaccagcctcatccccaacctgaggaacgtggtcgctctggacacggaggtggccagcaatagaatctactggtctgacctgtcccagagaatgatctgcagcacccagcttgacagagcccacggcgtctcttcctatgacaccgtcatcagcagagacatccaggcccccgacgggctggctgtggactggatccacagcaacatctactggaccgactctgtcctgggcactgtctctgttgcggataccaagggcgtgaagaggaaaacgttattcagggagaacggctccaagccaagggccatcgtggtggatcctgttcatggcttcatgtactggactgactggggaactcccgccaagatcaagaaagggggcctgaatggtgtggacatctactcgctggtgactgaaaacattcagtggcccaatggcatcaccctagatctcctcagtggccgcctctactgggttgactccaaacttcactccatctcaagcatcgatgtcaacgggggcaaccggaagaccatcttggaggatgaaaagaggctggcccaccccttctccttggccgtctttgaggacaaagtattttggacagatatcatcaacgaagccattttcagtgccaaccgcctcacaggttccgatgtcaacttgttggctgaaaacctactgtccccagaggatatggttctcttccacaacctcacccagccaagaggagtgaactggtgtgagaggaccaccctgagcaatggcggctgccagtatctgtgcctccctgccccgcagatcaacccccactcgcccaagtttacctgcgcctgcccggacggcatgctgctggccagggacatgaggagctgcctcacagaggctgaggctgcagtggccacccaggagacatccaccgtcaggctaaaggtcagctccacagccgtaaggacacagcacacaaccacccgacctgttcccgacacctcccggctgcctggggccacccctgggctcaccacggtggagatagtgacaatgtctcaccaagctctgggcgacgttgctggcagaggaaatgagaagaagcccagtagcgtgagggctctgtccattgtcctccccatcgtgctcctcgtcttcctttgcctgggggtcttccttctatggaagaactggcggcttaagaacatcaacagcatcaactttgacaaccccgtctatcagaagaccacagaggatgaggtccacatttgccacaaccaggacggctacagctacccctcgagacagatggtcagtctggaggatgacgtggcgtgaacatctgcctggagtcccgtccctgcccagaacccttcctgagacctcgccggccttgttttattcaaagacagagaagaccaaagcattgcctgccagagctttgttttatatatttattcatctgggaggcagaacaggcttcggacagtgcccatgcaatggcttgggttgggattttggtttcttcctttcctcgtgaaggataagagaaacaggcccggggggaccaggatgacacctccatttctctccaggaagttttgagtttctctccaccgtgacacaatcctcaaacatggaagatgaaaggggaggggatgtcaggcccagagaagcaagtggctttcaacacacaacagcagatggcaccaacgggaccccctggccctgcctcatccaccaatctctaagccaaacccctaaactcaggagtcaacgtgtttacctcttctatgcaagccttgctagacagccaggttagcctttgccctgtcacccccgaatcatgacccacccagtgtctttcgaggtgggtttgtaccttccttaagccaggaaagggattcatggcgtcggaaatgatctggctgaatccgtggtggcaccgagaccaaactcattcaccaaatgatgccacttcccagaggcagagcctgagtcactggtcacccttaatatttattaagtgcctgagacacccggttaccttggccgtgaggacacgtggcctgcacccaggtgtggctgtcaggacaccagcctggtgcccatcctcccgacccctacccacttccattcccgtggtctccttgcactttctcagttcagagttgtacactgtgtacatttggcatttgtgttattattttgcactgttttctgtcgtgtgtgttgggatgggatcccaggccagggaaagcccgtgtcaatgaatgccggggacagagaggggcaggttgaccgggacttcaaagccgtgatcgtgaatatcgagaactgccattgtcgtctttatgtccgcccacctagtgcttccacttctatgcaaatgcctccaagccattcacttccccaatcttgtcgttgatgggtatgtgtttaaaacatgcacggtgaggccgggcgcagtggctcacgcctgtaatcccagcactttgggaggccgaggcgggtggatcatgaggtcaggagatcgagaccatcctggctaacacgtgaaaccccgtctctactaaaaatacaaaaaattagccgggcgtggtggcgggcacctgtagtcccagctactcgggaggctgaggcaggagaatggtgtgaacccgggaagcggagcttgcagtgagccgagattgcgccactgcagtccgcagtctggcctgggcgacagagcgagactccgtctcaaaaaaaaaaaacaaaaaaaaaccatgcatggtgcatcagcagcccatggcctctggccaggcatggcgaggctgaggtgggaggatggtttgagctcaggcatttgaggctgtcgtgagctatgattatgccactgctttccagcctgggcaacatagtaagaccccatctcttaaaaaatgaatttggccagacacaggtgcctcacgcctgtaatcccagcactttgggaggctgagctggatcacttgagttcaggagttggagaccaggcctgagcaacaaagcgagatcccatctctacaaaaaccaaaaagttaaaaatcagctgggtacggtggcacgtgcctgtgatcccagctacttgggaggctgaggcaggaggatcgcctgagcccaggaggtggaggttgcagtgagccatgatcgagccactgcactccagcctgggcaacagatgaagaccctatttcagaaatacaactataaaaaaataaataaatcctccagtctggatcgtttgacgggacttcaggttctttctgaaatcgccgtgttactgttgcactgatgtccggagagacagtgacagcctccgtcagactcccgcgtgaagatgtcacaagggattggcaattgtccccagggacaaaacactgtgtcccccccagtgcagggaaccgtgataagcctttctggtttcggagcacgtaaatgcgtccctgtacagatagtggggattttttgttatgtttgcactttgtatattggttgaaactgttatcacttatatatatatatatacacacatatatataaaatctatttatttttgcaaaccctggttgctgtatttgttcagtgactattctcggggccctgtgtagggggttattgcctctgaaatgcctcttctttatgtacaaagattatttgcacgaactggactgtgtgcaacgctttttgggagaatgatgtccccgttgtatgtatgagtggcttctgggagatgggtgtcactttttaaaccactgtatagaaggtttttgtagcctgaatgtcttactgtgatcaattaaatttcttaaatgaaccaa